(19) United States
(12) Patent Application Publication
(10) Pub. No.: US 2016/0333346 A1
(43) Pub. Date: Nov. 17, 2016

(54) NUCLEIC ACID CAPABLE OF INHIBITING EXPRESSION OF BETA-2GPI

(71) Applicant: KYOWA HAKKO KIRIN CO., LTD., Tokyo (JP)

(72) Inventors: Yoji YAMADA, Machida-shi (JP); Hiroto IWAI, Machida-shi (JP); Kazuhiro MASUDA, Machida-shi (JP); Minako KANDA, Machida-shi (JP)

(73) Assignee: KYOWA HAKKO KIRIN CO., LTD., Tokyo (JP)

(21) Appl. No.: 15/111,704

(22) PCT Filed: Jan. 16, 2015
(86) PCT No.: PCT/JP2015/051139

§ 371 Date: Jul. 14, 2016

(30) Foreign Application Priority Data
Jan. 17, 2014 (JP) 2014-007305

(51) Int. Cl. C12N 15/113

(52) U.S. Cl. CPC C12N 15/113; C12N 2310/14; C12N 2310/321; C12N 2310/11; C12N 2320/30

(57) ABSTRACT

The present invention provides a nucleic acid having activity to suppress expression of β2GPI, a pharmaceutical composition comprising the nucleic acid, and a prophylactic or therapeutic drug containing the nucleic acid for autoimmune diseases such as APS, SLE and the like and thrombosis in hemodialysis.

### TECHNICAL FIELD

[0001] The present invention relates to a nucleic acid for use for suppression of expression of β2GPI or a pharmaceutical composition comprising the nucleic acid.

### BACKGROUND ART

[0002] β2-Glycoprotein 1 (β2GPI) (another name, also referred to as apolipoprotein H, apoH) is a glycoprotein consisting of 326 amino acids, and has a high-order structure in which 5 structural domains are connected. β2GPI is considered to have many different kinds of physiological actions, and has been reported to be involved in platelet aggregation reaction, coagulation and fibrinolysis reaction, and oxidized LDL uptake in macrophages (non-patent document 1).

[0003] As for the association with diseases, it is known that β2GPI is a major corresponding antigen to antiphospholipid antibody that emerges in autoimmune diseases such as antiphospholipid antibody syndrome (APS) and systemic lupus erythematosus (SLE). Anti-β2GPI antibody is also deeply involved in the pathology formation in diseases, and it has also been revealed by researches using animal models and clinical researches that a complex formed by β2GPI and anti-β2GPI antibodies generates activation signals in membrane receptors of various cells such as vascular endothelial cell, monocyte, platelet, and trophoblast and, as a result, can induce pathology characteristic of APS, such as thrombosis and abnormal pregnancy (non-patent document 2). It is expected that the above-mentioned diseases can be prevented or treated by specifically inhibiting the formation of immune complex consisting of β2GPI and anti-β2GPI antibodies. However, since β2GPI is present in blood at a comparatively high concentration of 50-500 μg/mL, it is not easy to continuously inhibit all such β2GPI with, for example, general antibody drugs (non-patent document 3).

[0004] On the other hand, as a method of suppressing expression itself of genes, a method utilizing, for example, RNA interference (hereinafter to be referred to as RNAi) and the like are known. To be specific, it was found that expression of a target gene is specifically suppressed by introducing a double-stranded RNA having the same sequence as the target gene and the RNA is named as short interfering RNA (siRNA) (patent document 1). As a method of suppressing expression of gene besides RNA interference, moreover, an antisense method is known (patent document 2).

[0005] While a part of the siRNA sequences targeting human β2GPI gene has been disclosed, it is not known that the siRNA sequences suppress expression of human β2GPI gene (patent documents 3, 4).

### DOCUMENT LIST

### Patent Documents

[0006] patent document 1: WO 2001/75164
[0007] patent document 2: WO 98/56905
[0008] patent document 3: WO 2005/116204
[0009] patent document 4: WO 2008/043561

### Non-Patent Documents

[0010] non-patent document 1: Ann. N. Y. Acad. Sci., 1285, 44-58 (2013)
[0011] non-patent document 2: N. Engl. J. Med., 368, 1033-1044 (2013)
[0012] non-patent document 3: J. Thromb. Haemost., 9, 1275-1284 (2011)

### SUMMARY OF THE INVENTION

### Problems to be Solved by the Invention

[0013] The present invention aims to provide a nucleic acid capable of suppressing expression of β2GPI. The present invention also aims to provide a pharmaceutical composition for the prophylaxis or treatment of diseases associated with β2GPI expression.

### Means of Solving the Problems

[0014] The present invention relates to the following (1)-(13).

(1) A double-stranded nucleic acid that decreases expression of β2GPI gene, which consists of a sense strand and an antisense strand, and comprises a double-stranded region of at least 11 base pairs, wherein an oligonucleotide chain having a chain length of at least 17 nucleotides and 30 nucleotides at most in the aforementioned antisense strand is complementary to a target β2GPI mRNA sequence selected from the group described in Tables 1-1 to 1-16.
(2) The double-stranded nucleic acid of (1), wherein the aforementioned double-stranded region is composed of 11-27 base pairs, and the 2nd nucleotide from the 5′-terminus of the aforementioned antisense strand complementary to the target β2GPI mRNA sequence selected from the group described in Tables 1-1 to 1-16 is complement to the 2nd deoxyribonucleotide from the 3′-terminus of the target β2GPI mRNA sequence.
(3) The double-stranded nucleic acid of (1), wherein the 3′-terminus of the aforementioned sense strand and the 5′-terminus of the aforementioned antisense strand form a blunt end.
(4) The double-stranded nucleic acid of (1), wherein the aforementioned sense strand is 21 nucleotides in length and the aforementioned antisense strand is 21 nucleotides in length.
(5) The double-stranded nucleic acid of (4), which is a modified double-stranded nucleic acid comprising a double-stranded region of 19 base pairs that decreases expression of β2GPI gene, wherein 40-65% of the nucleotides in the double-stranded region comprises 2′-O-methyl modified nucleotide.
(6) The double-stranded nucleic acid of (1), wherein the aforementioned antisense strand comprises a sequence selected from the groups described in “antisense strand” in Tables 1-1 to 1-16 and Tables 3-1 to 3-5.
(7) The double-stranded nucleic acid of (1), wherein the aforementioned sense strand comprises a sequence selected from the groups described in “sense strand” in Tables 1-1 to 1-16 and Tables 3-1 to 3-5.
(8) The double-stranded nucleic acid of (1), comprising a sequence of 1 pair of sense strand/antisense strand selected from the group consisting of the sense strands/antisense strands described in Tables 1-1 to 1-16 and Tables 3-1 to 3-5.
(9) The double-stranded nucleic acid of any one of (1)-(8), comprising a ligand.
(10) A single strand nucleic acid consisting only of an antisense strand in the double-stranded nucleic acid of any one of (1)-(9).
(11) A pharmaceutical composition comprising the nucleic acid of any one of (1)-(10).
(12) A method of treating a disorder mediated by an anti-β2GPI antibody, comprising a step of administering a therapeutically effective amount of the nucleic acid of any one of (1)-(10) or the pharmaceutical composition of (11) to a human in need of such treatment.
(13) The method of (12), wherein the aforementioned disorder is an autoimmune disease or thrombosis.

### Effect of the Invention

[0015] Expression of β2GPI can be suppressed by administering the nucleic acid of the present invention or pharmaceutical composition comprising the nucleic acid. Particularly, it is useful for the treatment or prophylaxis of a disease associated with the expression of β2GPI.

### DESCRIPTION OF EMBODIMENTS

[0016] As a β2GPI gene (gene encoding β2GPI) targeted by the nucleic acid of the present invention, a gene producing a full-length mRNA of β2GPI corresponding to β2GPI cDNA (SEQ ID NO: 3541) registered as Genbank Accession No. NM_000042 can be mentioned.

### 1. Nucleic Acid of the Present Invention

[0017] In the present invention, a nucleic acid comprising a nucleotide sequence complementary to β2GPI mRNA is referred to as an antisense strand nucleic acid, and a nucleic acid comprising a nucleotide sequence complementary to a nucleotide sequence of an antisense strand nucleic acid is also referred to as a sense strand nucleic acid. In the present specification, unless otherwise specified, “the nucleic acid of the present invention” is used to encompass antisense strand nucleic acid, sense strand nucleic acid, and double-stranded nucleic acid pairing a sense strand and an antisense strand nucleic acid.

[0018] The nucleic acid of the present invention may be any molecule as long as it is a molecule wherein nucleotide or molecule having equivalent function as that of the nucleotide are polymerized. Examples of thereof include RNA which is a polymer of ribonucleotide, DNA which is a polymer of deoxyribonucleotide, chimeric nucleic acid composed of RNA and DNA, and nucleotide polymer wherein at least one nucleotide of these nucleic acids is substituted by a molecule having equivalent function as that of nucleotide. In addition, a derivative containing at least one molecule having equivalent function as that of the nucleotide in these nucleic acids is also encompassed in the nucleic acid of the present invention. Uracil (U) can be unambiguously read as thymine (T).

[0019] Examples of the molecule having equivalent function as that of the nucleotide include nucleotide derivatives and the like. The nucleotide derivative may be any molecule as long as it is a molecule obtained by modifying nucleotide. For example, a molecule obtained by modifying ribonucleotide or deoxyribonucleotide and the like to improve or stabilize nuclease resistance, enhance affinity for complementary chain nucleic acid, enhance cell permeability or visualize same, as compared to RNA or DNA, are preferably used.

[0020] Examples of the molecule obtained by modifying a nucleotide include sugar moiety-modified nucleotide, phosphodiester bond-modified nucleotide, base-modified nucleotide, a nucleotide wherein at least one of a sugar moiety, a phosphodiester bond and a base is modified and the like.

[0021] While the sugar moiety-modified nucleotide may be any as long as the chemical structure of sugar of nucleotide is partly or entirely modified or substituted by any substituent, or substituted by any atom, 2′-modified nucleotide is preferably used.

[0022] Examples of the 2′-modified nucleotide include a nucleotide wherein 2′-OH group of ribose is substituted by a substituent selected from H, OR, R, R′ OR, SH, SR, NH₂, NHR, NR₂, N₃, CN, F, Cl, Br and I (R is alkyl or aryl, preferably alkyl having 1-6 carbon atoms, R′ is alkylene, preferably alkylene having 1-6 carbon atoms), preferably a nucleotide wherein 2′-OH group is substituted by H, F or methoxy group, more preferably a nucleotide wherein 2′-OH group is substituted by F or methoxy group. In addition, a nucleotide wherein 2′-OH group is substituted by a substituent selected from the group consisting of 2-(methoxy)ethoxy group, 3-aminopropoxy group, 2-[(N,N-dimethylamino)oxy]ethoxy group, 3-(N,N-dimethylamino)propoxy group, 2-[2-(N,N-dimethylamino) ethoxy] ethoxy group, 2-(methylamino)-2-oxoethoxy group, 2-(N-methylcarbamoyl)ethoxy group and 2-cyanoetoxy group, and the like can also be mentioned.

[0023] The 2′-O-methyl modified nucleotide is preferably contained at 10-70%, more preferably 20-40%, particularly preferably 40-65%, relative to the nucleotide in a double-stranded nucleic acid region. In addition, 2′-O-methyl modified nucleotide is preferably contained at 20-40%, more preferably 40-60%, particularly preferably 60-100%, relative to the nucleotide in a sense strand. In addition, 2′-O-methyl modified nucleotide is preferably contained at 0-40%, more preferably 10-20%, particularly preferably 20-40%, relative to the nucleotide in an antisense strand.

[0024] As the sugar moiety modified nucleotide, a crosslinking structure type artificial nucleic acid having two cyclic structures by introducing a crosslinking structure into the sugar moiety (Bridged Nucleic Acid) (BNA) can be mentioned. Specific examples thereof include locked artificial nucleic acid wherein the 2′-position oxygen atom and the 4′-position carbon atom are crosslinked via methylene (Locked Nucleic Acid) (LNA), ethylene crosslinking structure type artificial nucleic acid (Ethylene bridged nucleic acid) (ENA) [Nucleic Acid Research, 32, e175(2004)] and the like, and further, peptide nucleic acid (PNA) [Acc. Chem. Res., 32, 624 (1999)], oxy-peptide nucleic acid (OPNA) [J. Am. Chem. Soc., 123, 4653 (2001)], peptide ribonucleic acid (PRNA) [J. Am. Chem. Soc., 122, 6900 (2000)] and the like.

[0025] The phosphodiester bond-modified nucleotide may be any as long as the chemical structure of the phosphodiester bond is partly or entirely modified or substituted by any substituent, or substituted by any atom. Examples thereof include a nucleotide wherein phosphodiester bond is substituted by phosphorothioate bond, a nucleotide wherein phosphodiester bond is substituted by phosphorodithioate bond, a nucleotide wherein phosphodiester bond is substituted by alkylphosphonate bond, a nucleotide wherein phosphodiester bond is substituted by phosphoramidate bond and the like.

[0026] The base-modified nucleotide may be any as long as the chemical structure of the base of the nucleotide is partly or entirely modified or substituted by any substituent, or substituted by any atom. Examples thereof include one wherein oxygen atom in the base is substituted by sulfur atom, one wherein hydrogen atom is substituted by alkyl group having 1-6 carbon atoms, halogen and the like, one wherein methyl group is substituted by hydrogen, hydroxymethyl, alkyl group having 2-6 carbon atoms and the like, and one wherein amino group is substituted by alkyl group having 1-6 carbon atoms, alkanoyl group having 1-6 carbon atoms, oxo group, hydroxy group, and the like.

[0027] As the nucleotide derivative, one obtained by adding other chemical substance such as peptide, protein, sugar, lipid, phospholipid, phenazine, folate, phenanthridine, anthraquinone, acridine, fluorescein, rhodamine, coumarin, dye and the like, directly or via a linker, to a nucleotide or a nucleotide derivative wherein at least one of sugar moiety, phosphodiester bond and base is modified can also be mentioned. Specific examples thereof include 5′-polyamine-added nucleotide derivative, cholesterol-added nucleotide derivative, steroid-added nucleotide derivative, bile acid-added nucleotide derivative, vitamin-added nucleotide derivative, Cy5-added nucleotide derivative, Cy3-added nucleotide derivative, 6-FAM-added nucleotide derivative, and biotin-added nucleotide derivative and the like.

[0028] The nucleotide derivative may form a crosslinking structure, such as alkylene structure, peptide structure, nucleotide structure, ether structure, ester structure, a structure of a combination of at least one of these and the like, with other nucleotide or nucleotide derivative in the nucleic acid.

[0029] The nucleic acid of the present invention also encompasses a nucleic acid wherein the atoms in a molecule are partly or entirely substituted by an atom (isotope) having a different mass number.

[0030] In the present specification, “complement” means a relationship forming a base pairing between two bases, and refers to a double helix structure as a whole double-stranded region via a loose hydrogen bond, for example, the relationship between adenine and thymine or uracil, and the relationship between guanine and cytosine.

[0031] In the present specification, “complementary” means not only complete complementarity between two nucleotide sequences, but also includes 0-30%, 0-20% or 0-10% of mismatch bases between the nucleotide sequences. For example, an antisense strand complementary to β2GPI mRNA may contain substitution of one or more bases in a nucleotide sequence completely complementary to a partial nucleotide sequence of the mRNA. To be specific, an antisense strand may contain 1-8, preferably 1-6, 1-4, 1-3, particularly 2 or one mismatch base in a target sequence of the target gene. For example, when the antisense strand has 21 bases in length, it may contain 6, 5, 4, 3, 2 or one mismatch base in a target sequence of the target gene, and the position of the mismatch may be the 5′-terminus or 3′-terminus of the sequence.

[0032] In addition, “complementary” encompasses a nucleotide sequence wherein one of the sequences is completely complementary to the other nucleotide sequence, and one or more bases are added and/or deleted. For example, β2GPI mRNA and the antisense strand nucleic acid of the present invention may contain 1 or 2 bulge bases in an antisense strand and/or target β2GPI mRNA region due to the addition and/or deletion of base in the antisense strand.

[0033] The nucleic acid of the present invention may be constituted of any nucleotide or a derivative thereof as long as it is a nucleic acid containing a nucleotide sequence complementary to a part of the nucleotide sequence of β2GPI mRNA and/or a nucleic acid containing a nucleotide sequence complementary to the nucleotide sequence of the nucleic acid. The double-stranded nucleic acid of the present invention may have any length as long as a nucleic acid containing a nucleotide sequence complementary to the target β2GPI mRNA sequence and a nucleic acid containing a nucleotide sequence complementary to the nucleotide sequence of the nucleic acid can form a double strand. The length of the sequence capable of forming a double strand is generally 11-35 bases, preferably 15-30 bases, more preferably 17-25 bases, further preferably 17-23 bases, particularly preferably 19-23 bases.

[0034] As the antisense strand nucleic acid of the present invention, a nucleic acid containing a nucleotide sequence complementary to the target β2GPI mRNA sequence is used, wherein 1-3 bases, preferably 1-2 bases, more preferably 1 base, in the nucleic acid may be deleted, substituted or added.

[0035] As a nucleic acid that suppresses expression of β2GPI, a single strand nucleic acid containing a nucleotide sequence complementary to the target β2GPI mRNA sequence and capable of suppressing the expression of β2GPI, or a double-stranded nucleic acid consisting of a nucleic acid containing a nucleotide sequence complementary to the target β2GPI mRNA sequence and a nucleic acid containing a nucleotide sequence complementary to the nucleotide sequence of the nucleic acid, and capable of suppressing the expression of β2GPI is preferably used.

[0036] In the present invention, a double-stranded nucleic acid refers to a nucleic acid wherein two nucleotide chains are paired to form a double-stranded region. The double-stranded region refers to a portion in which a nucleotide or a derivative thereof constituting a double-stranded nucleic acid constitutes a base pair to form a double strand. The double-stranded region generally contains 11-27 base pairs, preferably 15-25 base pairs, more preferably 15-23 base pairs, further preferably 17-21 base pairs, particularly preferably 17-19 base pairs.

[0037] A single strand nucleic acid constituting a double-stranded nucleic acid generally consists of 11-30 bases, preferably 15-29 bases, more preferably 15-27 bases, further preferably 15-25 bases, particularly preferably 17-23 bases, most preferably 19-21 bases.

[0038] When the double-stranded nucleic acid of the present invention has an additional nucleotide or nucleotide derivative that does not form a double strand on the 3′-side or 5′-side following a double-stranded region, it is called a protruding part (overhang). When a protruding part is present, a nucleotide constituting the protruding part may be ribonucleotide, deoxyribonucleotide or a derivative thereof.

[0039] As a double-stranded nucleic acid having a protruding part, one having a protruding part of 1-6 bases, generally 1-3 bases, preferably one having a protruding part of 2 bases, for example, protruding part composed of dTdT or UU, on the 3′-terminus or 5′-terminus of at least one of the chains is used. The protruding part may be present in an antisense strand alone, a sense strand alone, or both an antisense strand and a sense strand. In the present invention, a double-stranded nucleic acid having protruding part in both an antisense strand and a sense strand is preferably used. In the antisense strand, an oligonucleotide chain consisting of at least 17 nucleotides and 30 nucleotides at most and comprising a double-stranded region and a subsequent protruding part is sufficiently complementary to a target β2GPI mRNA sequence selected from the group described in Tables 1-1 to 1-16. As the double-stranded nucleic acid of the present invention, moreover, a nucleic acid molecule generating the above-mentioned double-stranded nucleic acid by the action of a ribonuclease such as Dicer and the like (WO2005/089287), a double-stranded nucleic acid forming a blunt end without having a protruding part on the 3′-terminus or 5′-terminus, a double-stranded nucleic acid with protrusion of a sense strand alone (US2012/0040459) and the like can also be used.

[0040] As the double-stranded nucleic acid of the present invention, a nucleic acid consisting of the same sequence as a nucleotide sequence of the target gene or a nucleotide sequence of a complementary chain thereof may be used, or a double-stranded nucleic acid consisting of a nucleic acid wherein 1-4 bases on the 5′-terminus or 3′-terminus of at least one of the chains of the nucleic acid is deleted, and a nucleic acid containing a nucleotide sequence complementary to a nucleotide sequence of the nucleic acid may be used.

[0041] The double-stranded nucleic acid of the present invention may be a double-stranded RNA (dsRNA) wherein RNAs form a double strand, a double-stranded DNA (dsDNA) wherein DNAs form a double strand, or a hybrid nucleic acid wherein RNA and DNA form a double strand. Alternatively, one or both of the chains of the double strand may be a chimeric nucleic acid of DNA and RNA. Preferred is a double-stranded RNA (dsRNA).

[0042] The 2nd nucleotide from the 5′-terminus of the antisense strand of the present invention is preferably complement to the 2nd deoxyribonucleotide from the 3′-terminus of the target β2GPI mRNA sequence, the 2-7th nucleotides from the 5′-terminus of the antisense strand is more preferably completely complement to the 2-7th deoxyribonucleotides from the 3′-terminus of the target β2GPI mRNA sequence, and the 2-11th nucleotides from the 5′-terminus of the antisense strand is further preferably completely complement to the 2-11th deoxyribonucleotides from the 3′-terminus of the target β2GPI mRNA sequence. In addition, the 11th nucleotide from the 5′-terminus of the antisense strand of the nucleic acid of the present invention is preferably complement to the 11th deoxyribonucleotide from the 3′-terminus of the target β2GPI mRNA sequence, the 9-13th nucleotides from the 5′-terminus of the antisense strand is more preferably completely complement to the 9-13th deoxyribonucleotides from the 3′-terminus of the target β2GPI mRNA sequence, and the 7-15th nucleotides from the 5′-terminus of the antisense strand is further preferably completely complement to the 7-15th deoxyribonucleotides from the 3′-terminus of the target β2GPI mRNA sequence.

[0043] A method of producing the nucleic acid of the present invention is not particularly limited, and a method using a known chemical synthesis, or an enzymatic transcription method and the like can be mentioned. As a method using a known chemical synthesis, a phosphoramidite method, a phosphorothioate method, a phosphotriester method, a CEM method [Nucleic Acid Research, 35, 3287 (2007)] and the like can be mentioned and, for example, it can be synthesized by ABI3900 High Throughput nucleic acid synthesizer (manufactured by Applied Biosystems). After completion of the synthesis, desorption from a solid phase, removal of a protecting group, purification of the object product and the like are performed. It is desirable to obtain a nucleic acid having purity of not less than 90%, preferably not less than 95%, by purification. In the case of a double-stranded nucleic acid, synthesized and purified sense strand and antisense strand are mixed at a suitable ratio, for example, 0.1-10 equivalents, preferably 0.5-2 equivalents, more preferably 0.9-1.1 equivalents, further preferably an equivalent molar quantity, of sense strand per 1 equivalent of antisense strand, and may be used after annealing, or directly used without a step of annealing the mixture. Annealing may be performed under any conditions as long as a double-stranded nucleic acid can be formed. It is generally performed by mixing almost equivalent molar quantities of sense strand and antisense strand, heating same at about 94° C. for about 5 min and slowly cooling to room temperature. As an enzymatic transcription method for producing the nucleic acid of the present invention, a method using a plasmid or DNA having the object nucleotide sequence as a template, and including transcription using phage RNA polymerase, for example, T7, T3, or SP6RNA polymerase, can be mentioned.

[0044] The nucleic acid of the present invention can be introduced into a cell by using a carrier for transfection, preferably a cationic carrier such as cationic liposome and the like. Also, it can be directly introduced into a cell by a calcium phosphate method, an electroporation method, a microinjection method and the like.

[0045] In the nucleic acid of the present invention, the 5′-terminus, the 3′-terminus or/and an inner portion of sequence may be modified by one or more ligands and fluorophores, and a nucleic acid modified by a ligand or fluorophore is also called a conjugate nucleic acid. It is possible to provide a modification on the 5′-terminus, the 3′-terminus or/and an inner portion of sequence by reacting, during elongation reaction on a solid phase, a modifier capable of reaction on the solid phase. A conjugate nucleic acid can also be obtained by synthesizing and purifying, in advance, a nucleic acid introduced with a functional group such as amino group, mercapto group, azido group, triple bond and the like, and reacting same with a modifier. While the ligand may be a molecule having affinity for a biological molecule, for example, lipids such as cholesterol, fatty acid, tocopherol, retinoid and the like, saccharides such as N-acetylgalactosamine (GalNAc), galactose (Gal), mannose (Man) and the like, antibodies such as full antibody, Fab, VHH and the like, proteins such as low-density lipoprotein (LDL), human serum albumin and the like, peptides such as RGD, NGR, R9, CPP and the like, small molecules such as folic acid and the like, synthesis polymers such as synthetic polyamino acid and the like, nucleic acid aptamers and the like can be mentioned, and these can also be used in combination. Examples of the fluorophore include Cy3 series, Alexa series, black hole quencher and the like.

[0046] A vector capable of expressing the nucleic acid of the present invention after introduction into a cell may be used instead of the nucleic acid of the present invention. To be specific, an expression vector is constructed by inserting a sequence encoding the nucleic acid of the present invention into the downstream of a promoter in the expression vector, and introduced into a cell, whereby the nucleic acid and the like can be expressed. Examples of the expression vector include pCDNA6.2-GW/miR (manufactured by Invitrogen), pSilencer 4.1-CMV (manufactured by Ambion), pSINsi-hH1 DNA (manufactured by Takara Bio Inc.), pSINsi-hU6 DNA (manufactured by Takara Bio Inc.), pENTR/U6 (manufactured by Invitrogen) and the like.

[0047] It is also possible to use a recombinant viral vector produced by inserting a sequence encoding the nucleic acid of the present invention into the downstream of a promoter in the expression vector and introducing the vector into a packaging cell. Examples of the viral vector include retroviral vector, lentiviral vector, adenoviral vector, adeno-associated viral vector and the like.

### 2. Nucleic Acid Having Activity to Suppress Expression of β2GPI

[0048] The antisense strand and sense strand of the present invention can be designed based on, for example, a nucleotide sequence (SEQ ID NO: 3541) of cDNA (sense strand) of the full length mRNA of human β2GPI registered as Genbank Accession No. NM_000042.

[0049] As a nucleic acid having an activity to suppress expression of β2GPI, a double-stranded nucleic acid having an activity to suppress expression of β2GPI, which consists of the antisense strand nucleic acid of the present invention containing a nucleotide sequence complementary to β2GPI mRNA, and the sense strand nucleic acid of the present invention containing a nucleotide sequence complementary to the nucleotide sequence of the nucleic acid, can be mentioned. A single strand nucleic acid constituting the double-stranded nucleic acid generally consists of 11-30 bases, preferably 15-29 bases, more preferably 15-27 bases, further preferably 15-25 bases, particularly preferably 17-23 bases, most preferably 19-21 bases. The double-stranded nucleic acid has a double-stranded region generally consisting of 15-27 base pairs, preferably 15-25 base pairs, more preferably 15-23 base pairs, further preferably 15-21 base pairs, particularly preferably 15-19 base pairs.

[0050] The expression of β2GPI can be suppressed by introducing these double-stranded nucleic acids into a cell. For example, the double-stranded nucleic acid of the present invention introduced into a cell at a concentration of several pM-several nM can suppress expression of β2GPI mRNA when cultured for not less than 24 hrs, for example, for 48 hrs.

[0051] The expression suppressive activity on β2GPI mRNA by the double-stranded nucleic acid of the present invention can be evaluated by transfecting the nucleic acid and the like to a human cell line and the like by using a cationic liposome and the like, culturing same for a given period, and quantifying the expression level of β2GPI mRNA in the human cell line.

[0052] As a nucleic acid having an activity to suppress expression of β2GPI besides the above-mentioned double-stranded nucleic acid, a single strand nucleic acid containing a nucleotide sequence complementary to a part of the nucleotide sequence of β2GPI mRNA, and suppress expression of the β2GPI can be mentioned. While a single strand nucleic acid constituting the nucleic acid generally consists of 8-30 bases, it preferably consists of 12-30 bases, more preferably 12-20 bases.

[0053] These single strand nucleic acids introduced into the cell can also suppress expression of β2GPI. For example, the single strand nucleic acid of the present invention introduced into a cell at a concentration of several pM-several nM can suppress expression of β2GPI mRNA when cultured for not less than 24 hrs, for example, for 48 hrs.

[0054] The expression suppressive activity on β2GPI mRNA by the single strand nucleic acid of the present invention can be evaluated by transfecting the nucleic acid and the like to a human cell line and the like by using a cationic liposome and the like, culturing same for a given period, and quantifying the expression level of β2GPI mRNA in the human cell line.

### 3. Pharmaceutical Composition of the Present Invention

[0055] The present invention also relates to a pharmaceutical composition comprising a nucleic acid such as the above-mentioned double-stranded nucleic acid, single strand nucleic acid and the like as an active ingredient. The pharmaceutical composition of the present invention can be used as a therapeutic or prophylactic agent for autoimmune diseases such as APS and SLE, and thrombosis in hemodialysis.

[0056] The pharmaceutical composition can further comprise a carrier effective for intracellular transfer of the nucleic acid. Examples of the carrier effective for intracellular transfer of the nucleic acid include cationic carriers. Examples of the cationic carrier include a cationic liposome, a cationic polymer and the like. As a carrier effective for intracellular transfer of the nucleic acid, a carrier utilizing a virus envelope may also be used. As a cationic polymer, JetSI (Qbiogene Inc.), Jet-PEI (polyethyleneimine; Qbiogene Inc.) and the like are preferably used. As a carrier utilizing a virus envelope, GenomeOne (HVJ-E liposome; ISHIHARA SANGYO KAISHA, LTD.) and the like are preferably used.

[0057] A composition comprising the nucleic acid of the present invention and the above-mentioned carrier can be prepared by a method known to those of ordinary skill in the art. For example, it can be prepared by mixing a carrier dispersion liquid and a nucleic acid solution at suitable concentrations. When a cationic carrier is used, generally, it can be prepared easily by mixing in an aqueous solution by a conventional method, since a nucleic acid has a negative electric charge in aqueous solutions. Examples of the aqueous solvent used for the preparation of the composition include electrolytic solutions such as water for injection, distilled water for injection, saline and the like, sugar solutions such as glucose solution, maltose solution and the like, and the like. The conditions such as pH and temperature and the like for preparation of the composition can be appropriately selected by those of ordinary skill in the art. Where necessary, the composition can also be formed as a uniform composition by a dispersion treatment using an ultrasonic dispersion apparatus, a high-pressure emulsion apparatus and the like. Since the method and conditions optimal for the preparation of a composition comprising a carrier and a nucleic acid depend on the carrier to be used, those of ordinary skill in the art can select an optimal method for the carrier to be used irrespective of the above-mentioned methods.

[0058] As the pharmaceutical composition of the present invention, a composition constituted of a composite particle comprising a nucleic acid and a lead particle as constituent components and a lipid membrane covering the composite particle can also be used preferably. Examples of the lead particle include a lipid assembly, a liposome, an emulsion particle, a polymer, a metal colloid, a fine particle preparation and the like, and a cationic liposome is preferably used. The lead particle in the present invention may contain a complex of a combination of not less than two from a lipid assembly, a liposome, an emulsion particle, a polymer, a metal colloid, a fine particle preparation and the like as a constituent component, or a complex of a combination of a lipid assembly, a liposome, an emulsion particle, a polymer, a metal colloid, a fine particle preparation and the like and other compound (e.g., sugar, lipid, inorganic compound etc.) as a constituent component.

[0059] Examples of the lipid membrane covering the composite particle include those comprising non-cationic lipid, lipid inhibiting aggregation of particles and cationic lipid and the like as a constituent component.

[0060] The composition can be prepared according to, for example, the method described in WO 2006/080118 and the like.

[0061] A suitable mixing ratio of the nucleic acid and the carrier comprised in the pharmaceutical composition of the present invention is 1-200 parts by weight of a carrier per 1 part by weight of nucleic acid. It is preferably 2.5-100 parts by weight, further preferably 7-25 parts by weight, of a carrier per 1 part by weight of a nucleic acid.

[0062] An average particle size of the pharmaceutical composition of the present invention is preferably about 10 nm-300 nm, more preferably about 30 nm-200 nm, further preferably about 50 nm-150 nm.

[0063] The pharmaceutical composition of the present invention may also comprise a pharmaceutically acceptable carrier, a diluent and the like besides the above-mentioned carrier. A pharmaceutically acceptable carrier, a diluent and the like are essentially chemically-inactive and harmless compositions, and do not at all influence the biological activity of the pharmaceutical composition of the present invention. Examples of the carrier and diluent include, but are not limited to, a salt solution, a sugar solution, a glycerol solution, ethanol and the like.

[0064] The pharmaceutical composition of the present invention comprises the complex in an amount effective for the treatment or prevention of diseases and is provided in a form permitting appropriate administration to patients. The formulation of the pharmaceutical composition of the present invention may be, for example, a liquid such as injection, eye drop, inhalation and the like, for example, an external preparation such as ointment, lotion and the like, and the like.

[0065] In the case of a liquid, the concentration range of the active ingredient in the pharmaceutical composition of the present invention is generally 0.001-25% (w/v), preferably 0.1-10% (w/v), more preferably 0.5-5% (w/v). The pharmaceutical composition of the present invention may comprise an adequate amount of any pharmaceutically acceptable additive, for example, an emulsion adjuvant, a stabilizer, an isotonicifier, a pH adjuster and the like. Any pharmaceutically acceptable additive can be added in a suitable step before or after dispersion of the complex.

[0066] The pH of the liquid is generally adjusted to about 5.0-about 8.5, preferably about 6.0-about 8.0, and preferably subjected to a sterilization treatment such as sterilization by filtration and the like, by using a membrane filter and the like.

[0067] The pharmaceutical composition of the present invention can also be prepared as a freeze-dried preparation. A freeze-dried preparation can be prepared by a dispersion treatment of a nucleic acid and a carrier, followed by a freeze-drying treatment. A freeze-drying treatment can be performed by a conventional method. For example, a given amount of a complex solution after the above-mentioned dispersion treatment is dispensed in a vial container under sterile conditions, predried for about 2 hrs under the condition of about −40° C. to −20° C., primarily predried at about 0-10° C. under reduced pressure, then secondarily dried at about 15-25° C. under reduced pressure to perform freeze-drying. Then, for example, the inside of the vial is substituted with a nitrogen gas and a cap is provided, whereby a freeze-dried preparation of the pharmaceutical composition of the present invention can be obtained.

[0068] The freeze-dried preparation can be used by redissolving by the addition of any suitable solution. Examples of the solution include electrolytic solutions such as water for injection, saline and the like, glucose solution, other general infusions and the like. While the liquid volume of this solution varies depending on the use and the like and is not particularly limited, it is preferably a 0.5- to 2-fold amount of the liquid volume before freeze-drying, or not more than 500 ml.

[0069] The pharmaceutical composition of the present invention can be administered to animals including human by, for example, intravenous administration, intraarterial administration, oral administration, tissue administration, transdermal administration, transmucosal administration or rectal administration, and is preferably administered by an appropriate method according to the symptom of the patient. Particularly, intravenous administration, transdermal administration, and transmucosal administration are preferably used. In addition, topical administration such as topical administration to a cancer site and the like can also be employed. Examples of the dosage form suitable for these administration methods include various injections, oral preparations, drip infusions, absorbents, eye drops, ointments, lotions, suppositories and the like.

[0070] While the dose of the pharmaceutical composition of the present invention is desirably determined in consideration of drug, dosage form, condition of patient such as age, body weight and the like, administration route, nature and severity of the disease and the like, it is generally 0.1 mg-10 g/day, preferably 1 mg-500 mg/day, for an adult in the mass of the nucleic acid. In some cases, a dose below these levels may be sufficient, or a dose above these levels may be conversely required. The pharmaceutical composition can be administered one to several times per day, or can be administered at one to several day intervals.

[0071] The present invention is explained in the following by referring to Examples, which are not to be construed as limitative.

### EXAMPLES

### Example 1 Preparation of Double-Stranded Nucleic Acid Sense Strands Consisting of the Ribonucleotide Shown in

[0072] SEQ ID NO: 1-1180, antisense strands consisting of the ribonucleotide shown in SEQ ID NO: 1181-2360 and double-stranded nucleic acids obtained by annealing them (a sense strand shown in SEQ ID NO: n (n=1-1180) and an antisense strand shown in SEQ ID NO: [n+1180] form a pair) were synthesized by Sigma-Aldrich under commitment.

### Example 2 Measurement of Knockdown Activity of β2GPI mRNA

[0073] HepG2 cells (obtained from ATCC, ATCC number: HB-8065), which is a cell line derived from human liver cancer, were seeded to a 96-well culture plate at 5,000 cells/80 μL/well. As a medium, MEM medium (manufactured by Life technologies, catalog No. 11095-098) containing 10% fetal bovine serum (FBS) was used. A double-stranded nucleic acid described in Table 1 and an RNAiMax transfection reagent (manufactured by Life technologies, catalog No.: 1401251) was diluted with Opti-MEM medium (manufactured by Life technologies, catalog No. 11058-021), and 20 μL of each siRNA/RNAiMax mixture was added to 96-well culture plate to the final concentration of double-stranded nucleic acid of 100 pM, and the mixture was cultured under the conditions 37° C., 5% CO₂ for 24 hrs. The cells were washed with PBS (phosphate buffered saline), and cDNA was synthesized from each plate by using Cells-to-Ct kit (manufactured by Applied Biosystems, catalog No.: AM1728) and according to the method described in the manual attached to the product. The cDNA (5 μL) was added to MicroAmp Optical 96-well plate (manufactured by Applied Biosystems, catalog No. 4326659), and 10 μL of TaqMan Gene Expression Master Mix (manufactured by Applied Biosystems, catalog No. 4369016), 3 μL of UltraPure Distilled Water (manufactured by Life technologies, catalog No.: 10977-015), 1 μL of human β2GPI probe, and 1 μL of human GAPDH probe were further added. The real-time PCR of human β2GPI gene and human GAPDH (D-glyceraldehyde-3-phosphate dehydrogenase) was performed by using the ABI7900 HT real-time PCR system. GAPDH is a constitutively expressed gene and was measured as the internal control, and the β2GPI expression level was normalized. The β2GPI mRNA relative expression level when each siRNA was introduced was calculated relative to the β2GPI mRNA amount when HepG2 cells were treated with a transfection reagent alone without addition of siRNA as 1.0. This experiment was performed 3 times and the mean of the β2GPI mRNA relative expression level is shown in Tables 1-1 to 1-16.

TABLE 1-1

| double- | | | | | | | |
|---|---|---|---|---|---|---|---|
| stranded | | sense | | antisense | | target | β2GPI |
| nucleic | | strand | | strand | | β2GPI | relative |
| acid | | sequence | | sequence | | mRNA | expression |
| number | SEQ ID NO: | (5′→3′) | SEQ ID NO: | (5′→3′) | SEQ ID NO: | sequence | level |
| AH0033 | SEQ ID NO: 33 | GUAGUGCCAGU | SEQ ID NO: 1213 | UGAGUCACACU | SEQ ID NO: 2393 | GTAGTGCCAG | 0.172 |
| | | GUGACUCAUC | | GGCACUACCA | | TGTGACTCA | |
| AH0034 | SEQ ID NO: 34 | UAGUGCCAGUG | SEQ ID NO: 1214 | AUGAGUCACAC | SEQ ID NO: 2394 | TAGTGCCAGT | 0.185 |
| | | UGACUCAUCC | | UGGCACUACC | | GTGACTCAT | |
| AH0035 | SEQ ID NO: 35 | AGUGCCAGUGU | SEQ ID NO: 1215 | GAUGAGUCACA | SEQ ID NO: 2395 | AGTGCCAGTG | 0.178 |
| | | GACUCAUCCA | | CUGGCACUAC | | TGACTCATC | |
| AH0036 | SEQ ID NO: 36 | GUGCCAGUGUG | SEQ ID NO: 1216 | GGAUGAGUCAC | SEQ ID NO: 2396 | GTGCCAGTGT | 0.191 |
| | | ACUCAUCCAC | | ACUGGCACUA | | GACTCATCC | |
| AH0037 | SEQ ID NO: 37 | UGCCAGUGUGA | SEQ ID NO: 1217 | UGGAUGAGUCA | SEQ ID NO: 2397 | TGCCAGTGTG | 0.148 |
| | | CUCAUCCACA | | CACUGGCACU | | ACTCATCCA | |
| AH0038 | SEQ ID NO: 38 | GCCAGUGUGAC | SEQ ID NO: 1218 | GUGGAUGAGUC | SEQ ID NO: 2398 | GCCAGTGTGA | 0.166 |
| | | UCAUCCACAA | | ACACUGGCAC | | CTCATCCAC | |
| AH0039 | SEQ ID NO: 39 | CCAGUGUGACU | SEQ ID NO: 1219 | UGUGGAUGAGU | SEQ ID NO: 2399 | CCAGTGTGAC | 0.179 |
| | | CAUCCACAAU | | CACACUGGCA | | TCATCCACA | |
| AH0040 | SEQ ID NO: 40 | CAGUGUGACUC | SEQ ID NO: 1220 | UUGUGGAUGAG | SEQ ID NO: 2400 | CAGTGTGACT | 0.126 |
| | | AUCCACAAUG | | UCACACUGGC | | CATCCACAA | |
| AH0041 | SEQ ID NO: 41 | AGUGUGACUCA | SEQ ID NO: 1221 | AUUGUGGAUGA | SEQ ID NO: 2401 | AGTGTGACTC | 0.081 |
| | | UCCACAAUGA | | GUCACACUGG | | ATCCACAAT | |
| AH0042 | SEQ ID NO: 42 | GUGUGACUCAU | SEQ ID NO: 1222 | CAUUGUGGAUG | SEQ ID NO: 2402 | GTGTGACTCA | 0.123 |
| | | CCACAAUGAU | | AGUCACACUG | | TCCACAATG | |
| AH0043 | SEQ ID NO: 43 | UGUGACUCAUC | SEQ ID NO: 1223 | UCAUUGUGGAU | SEQ ID NO: 2403 | TGTGACTCAT | 0.144 |
| | | CACAAUGAUU | | GAGUCACACU | | CCACAATGA | |
| AH0044 | SEQ ID NO: 44 | GUGACUCAUCC | SEQ ID NO: 1224 | AUCAUUGUGGA | SEQ ID NO: 2404 | GTGACTCATC | 0.148 |
| | | ACAAUGAUUU | | UGAGUCACAC | | CACAATGAT | |
| AH0045 | SEQ ID NO: 45 | UGACUCAUCCA | SEQ ID NO: 1225 | AAUCAUUGUGG | SEQ ID NO: 2405 | TGACTCATCC | 0.100 |
| | | CAAUGAUUUC | | AUGAGUCACA | | ACAATGATT | |
| AH0046 | SEQ ID NO: 46 | GACUCAUCCAC | SEQ ID NO: 1226 | AAAUCAUUGUG | SEQ ID NO: 2406 | GACTCATCCA | 0.114 |
| | | AAUGAUUUCU | | GAUGAGUCAC | | CAATGATTT | |
| AH0047 | SEQ ID NO: 47 | ACUCAUCCACA | SEQ ID NO: 1227 | GAAAUCAUUGU | SEQ ID NO: 2407 | ACTCATCCAC | 0.211 |
| | | AUGAUUUCUC | | GGAUGAGUCA | | AATGATTTC | |
| AH0048 | SEQ ID NO: 48 | CUCAUCCACAA | SEQ ID NO: 1228 | AGAAAUCAUUG | SEQ ID NO: 2408 | CTCATCCACA | 0.136 |
| | | UGAUUUCUCC | | UGGAUGAGUC | | ATGATTTCT | |
| AH0050 | SEQ ID NO: 50 | CAUCCACAAUG | SEQ ID NO: 1230 | GGAGAAAUCAU | SEQ ID NO: 2410 | CATCCACAAT | 0.157 |
| | | AUUUCUCCAG | | UGUGGAUGAG | | GATTTCTCC | |
| AH0051 | SEQ ID NO: 51 | AUCCACAAUGA | SEQ ID NO: 1231 | UGGAGAAAUCA | SEQ ID NO: 2411 | ATCCACAATG | 0.136 |
| | | UUUCUCCAGU | | UUGUGGAUGA | | ATTTCTCCA | |
| AH0052 | SEQ ID NO: 52 | UCCACAAUGAU | SEQ ID NO: 1232 | CUGGAGAAAUC | SEQ ID NO: 2412 | TCCACAATGA | 0.290 |
| | | UUCUCCAGUG | | AUUGUGGAUG | | TTTCTCCAG | |
| AH0053 | SEQ ID NO: 53 | CCACAAUGAUU | SEQ ID NO: 1233 | ACUGGAGAAAU | SEQ ID NO: 2413 | CCACAATGAT | 0.128 |
| | | UCUCCAGUGC | | CAUUGUGGAU | | TTCTCCAGT | |
| AH0054 | SEQ ID NO: 54 | CACAAUGAUUU | SEQ ID NO: 1234 | CACUGGAGAAA | SEQ ID NO: 2414 | CACAATGATT | 0.130 |
| | | CUCCAGUGCU | | UCAUUGUGGA | | TCTCCAGTG | |
| AH0055 | SEQ ID NO: 55 | ACAAUGAUUUC | SEQ ID NO: 1235 | GCACUGGAGAA | SEQ ID NO: 2415 | ACAATGATTT | 0.291 |
| | | UCCAGUGCUC | | AUCAUUGUGG | | CTCCAGTGC | |
| AH0056 | SEQ ID NO: 56 | CAAUGAUUUCU | SEQ ID NO: 1236 | AGCACUGGAGA | SEQ ID NO: 2416 | CAATGATTTC | 0.139 |
| | | CCAGUGCUCA | | AAUCAUUGUG | | TCCAGTGCT | |
| AH0057 | SEQ ID NO: 57 | AAUGAUUUCUC | SEQ ID NO: 1237 | GAGCACUGGAG | SEQ ID NO: 2417 | AATGATTTCT | 0.247 |
| | | CAGUGCUCAU | | AAAUCAUUGU | | CCAGTGCTC | |
| AH0058 | SEQ ID NO: 58 | AUGAUUUCUCC | SEQ ID NO: 1238 | UGAGCACUGGA | SEQ ID NO: 2418 | ATGATTTCTC | 0.110 |
| | | AGUGCUCAUC | | GAAAUCAUUG | | CAGTGCTCA | |
| AH0059 | SEQ ID NO: 59 | UGAUUUCUCCA | SEQ ID NO: 1239 | AUGAGCACUGG | SEQ ID NO: 2419 | TGATTTCTCC | 0.118 |
| | | GUGCUCAUCU | | AGAAAUCAUU | | AGTGCTCAT | |
| AH0060 | SEQ ID NO: 60 | GAUUUCUCCAG | SEQ ID NO: 1240 | GAUGAGCACUG | SEQ ID NO: 2420 | GATTTCTCCA | 0.111 |
| | | UGCUCAUCUU | | GAGAAAUCAU | | GTGCTCATC | |
| AH0061 | SEQ ID NO: 61 | AUUUCUCCAGU | SEQ ID NO: 1241 | AGAUGAGCACU | SEQ ID NO: 2421 | ATTTCTCCAG | 0.146 |
| | | GCUCAUCUUG | | GGAGAAAUCA | | TGCTCATCT | |
| AH0062 | SEQ ID NO: 62 | UUUCUCCAGUG | SEQ ID NO: 1242 | AAGAUGAGCAC | SEQ ID NO: 2422 | TTTCTCCAGT | 0.202 |
| | | CUCAUCUUGU | | UGGAGAAAUC | | GCTCATCTT | |
| AH0063 | SEQ ID NO: 63 | UUCUCCAGUGC | SEQ ID NO: 1243 | CAAGAUGAGCA | SEQ ID NO: 2423 | TTCTCCAGTG | 0.187 |
| | | UCAUCUUGUU | | CUGGAGAAAU | | CTCATCTTG | |
| AH0064 | SEQ ID NO: 64 | UCUCCAGUGCU | SEQ ID NO: 1244 | ACAAGAUGAGC | SEQ ID NO: 2424 | TCTCCAGTGC | 0.103 |
| | | CAUCUUGUUC | | ACUGGAGAAA | | TCATCTTGT | |
| AH0065 | SEQ ID NO: 65 | CUCCAGUGCUC | SEQ ID NO: 1245 | AACAAGAUGAG | SEQ ID NO: 2425 | CTCCAGTGCT | 0.084 |
| | | AUCUUGUUCU | | CACUGGAGAA | | CATCTTGTT | |
| AH0066 | SEQ ID NO: 66 | UCCAGUGCUCA | SEQ ID NO: 1246 | GAACAAGAUGA | SEQ ID NO: 2426 | TCCAGTGCTC | 0.128 |
| | | UCUUGUUCUC | | GCACUGGAGA | | ATCTTGTTC | |
| AH0067 | SEQ ID NO: 67 | CCAGUGCUCAU | SEQ ID NO: 1247 | AGAACAAGAUG | SEQ ID NO: 2427 | CCAGTGCTCA | 0.106 |
| | | CUUGUUCUCG | | AGCACUGGAG | | TCTTGTTCT | |
| AH0068 | SEQ ID NO: 68 | CAGUGCUCAUC | SEQ ID NO: 1248 | GAGAACAAGAU | SEQ ID NO: 2428 | CAGTGCTCAT | 0.103 |
| | | UUGUUCUCGA | | GAGCACUGGA | | CTTGTTCTC | |
| AH0069 | SEQ ID NO: 69 | AGUGCUCAUCU | SEQ ID NO: 1249 | CGAGAACAAGA | SEQ ID NO: 2429 | AGTGCTCATC | 0.152 |
| | | UGUUCUCGAG | | UGAGCACUGG | | TTGTTCTCG | |
| AH0070 | SEQ ID NO: 70 | GUGCUCAUCUU | SEQ ID NO: 1250 | UCGAGAACAAG | SEQ ID NO: 2430 | GTGCTCATCT | 0.078 |
| | | GUUCUCGAGU | | AUGAGCACUG | | TGTTCTCGA | |
| AH0071 | SEQ ID NO: 71 | UGCUCAUCUUG | SEQ ID NO: 1251 | CUCGAGAACAA | SEQ ID NO: 2431 | TGCTCATCTT | 0.091 |
| | | UUCUCGAGUU | | GAUGAGCACU | | GTTCTCGAG | |
| AH0072 | SEQ ID NO: 72 | GCUCAUCUUGU | SEQ ID NO: 1252 | ACUCGAGAACA | SEQ ID NO: 2432 | GCTCATCTTG | 0.111 |
| | | UCUCGAGUUU | | AGAUGAGCAC | | TTCTCGAGT | |
| AH0073 | SEQ ID NO: 73 | CUCAUCUUGUU | SEQ ID NO: 1253 | AACUCGAGAAC | SEQ ID NO: 2433 | CTCATCTTGT | 0.086 |
| | | CUCGAGUUUU | | AAGAUGAGCA | | TCTCGAGTT | |
| AH0074 | SEQ ID NO: 74 | UCAUCUUGUUC | SEQ ID NO: 1254 | AAACUCGAGAA | SEQ ID NO: 2434 | TCATCTTGTT | 0.073 |
| | | UCGAGUUUUC | | CAAGAUGAGC | | CTCGAGTTT | |
| AH0075 | SEQ ID NO: 75 | CAUCUUGUUCU | SEQ ID NO: 1255 | AAAACUCGAGA | SEQ ID NO: 2435 | CATCTTGTTC | 0.078 |
| | | CGAGUUUUCU | | ACAAGAUGAG | | TCGAGTTTT | |
| AH0076 | SEQ ID NO: 76 | AUCUUGUUCUC | SEQ ID NO: 1256 | GAAAACUCGAG | SEQ ID NO: 2436 | ATCTTGTTCT | 0.107 |
| | | GAGUUUUCUC | | AACAAGAUGA | | CGAGTTTTC | |
| AH0077 | SEQ ID NO: 77 | UCUUGUUCUCG | SEQ ID NO: 1257 | AGAAAACUCGA | SEQ ID NO: 2437 | TCTTGTTCTC | 0.137 |
| | | AGUUUUCUCU | | GAACAAGAUG | | GAGTTTTCT | |
| AH0078 | SEQ ID NO: 78 | CUUGUUCUCGA | SEQ ID NO: 1258 | GAGAAAACUCG | SEQ ID NO: 2438 | CTTGTTCTCG | 0.123 |
| | | GUUUUCUCUG | | AGAACAAGAU | | AGTTTTCTC | |

TABLE 1-2

| double- | | | | | | | |
|---|---|---|---|---|---|---|---|
| stranded | | sense | | antisense | | target | β2GPI |
| nucleic | | strand | | strand | | β2GPI | relative |
| acid | | sequence | | sequence | | mRNA | expression |
| number | SEQ ID NO: | (5′→3′) | SEQ ID NO: | (5′→3′) | SEQ ID NO: | sequence | level |
| AH0079 | SEQ ID NO: 79 | UUGUUCUCGAG | SEQ ID NO: 1259 | AGAGAAAACUC | SEQ ID NO: 2439 | TTGTTCTCGA | 0.163 |
| | | UUUUCUCUGC | | GAGAACAAGA | | GTTTTCTCT | |
| AH0080 | SEQ ID NO: 80 | UGUUCUCGAGU | SEQ ID NO: 1260 | CAGAGAAAACU | SEQ ID NO: 2440 | TGTTCTCGAG | 0.291 |
| | | UUUCUCUGCC | | CGAGAACAAG | | TTTTCTCTG | |
| AH0081 | SEQ ID NO: 81 | GUUCUCGAGUU | SEQ ID NO: 1261 | GCAGAGAAAAC | SEQ ID NO: 2441 | GTTCTCGAGT | 0.298 |
| | | UUCUCUGCCA | | UCGAGAACAA | | TTTCTCTGC | |
| AH0083 | SEQ ID NO: 83 | UCUCGAGUUUU | SEQ ID NO: 1263 | UGGCAGAGAAA | SEQ ID NO: 2443 | TCTCGAGTTT | 0.148 |
| | | CUCUGCCAUG | | ACUCGAGAAC | | TCTCTGCCA | |
| AH0084 | SEQ ID NO: 84 | CUCGAGUUUUC | SEQ ID NO: 1264 | AUGGCAGAGAA | SEQ ID NO: 2444 | CTCGAGTTTT | 0.187 |
| | | UCUGCCAUGU | | AACUCGAGAA | | CTCTGCCAT | |
| AH0085 | SEQ ID NO: 85 | UCGAGUUUUCU | SEQ ID NO: 1265 | CAUGGCAGAGA | SEQ ID NO: 2445 | TCGAGTTTTC | 0.146 |
| | | CUGCCAUGUU | | AAACUCGAGA | | TCTGCCATG | |
| AH0086 | SEQ ID NO: 86 | CGAGUUUUCUC | SEQ ID NO: 1266 | ACAUGGCAGAG | SEQ ID NO: 2446 | CGAGTITTCT | 0.149 |
| | | UGCCAUGUUG | | AAAACUCGAG | | CTGCCATGT | |
| AH0087 | SEQ ID NO: 87 | GAGUUUUCUCU | SEQ ID NO: 1267 | AACAUGGCAGA | SEQ ID NO: 2447 | GAGTTTTCTC | 0.221 |
| | | GCCAUGUUGC | | GAAAACUCGA | | TGCCATGTT | |
| AH0088 | SEQ ID NO: 88 | AGUUUUCUCUG | SEQ ID NO: 1268 | CAACAUGGCAG | SEQ ID NO: 2448 | AGTITTCTCT | 0.088 |
| | | CCAUGUUGCU | | AGAAAACUCG | | GCCATGTTG | |
| AH0089 | SEQ ID NO: 89 | GUUUUCUCUGC | SEQ ID NO: 1269 | GCAACAUGGCA | SEQ ID NO: 2449 | GTTTTCTCTG | 0.194 |
| | | CAUGUUGCUA | | GAGAAAACUC | | CCATGTTGC | |
| AH0090 | SEQ ID NO: 90 | UUUUCUCUGCC | SEQ ID NO: 1270 | AGCAACAUGGC | SEQ ID NO: 2450 | TTTTCTCTGC | 0.200 |
| | | AUGUUGCUAU | | AGAGAAAACU | | CATGTTGCT | |
| AH0091 | SEQ ID NO: 91 | UUUCUCUGCCA | SEQ ID NO: 1271 | UAGCAACAUGG | SEQ ID NO: 2451 | TTTCTCTGCC | 0.296 |
| | | UGUUGCUAUU | | CAGAGAAAAC | | ATGTTGCTA | |
| AH0092 | SEQ ID NO: 92 | UUCUCUGCCAU | SEQ ID NO: 1272 | AUAGCAACAUG | SEQ ID NO: 2452 | TTCTCTGCCA | 0.203 |
| | | GUUGCUAUUG | | GCAGAGAAAA | | TGTTGCTAT | |
| AH0093 | SEQ ID NO: 93 | UCUCUGCCAUG | SEQ ID NO: 1273 | AAUAGCAACAU | SEQ ID NO: 2453 | TCTCTGCCAT | 0.204 |
| | | UUGCUAUUGC | | GGCAGAGAAA | | GTTGCTATT | |
| AH0096 | SEQ ID NO: 96 | CUGCCAUGUUG | SEQ ID NO: 1276 | UGCAAUAGCAA | SEQ ID NO: 2456 | CTGCCATGTT | 0.051 |
| | | CUAUUGCAGG | | CAUGGCAGAG | | GCTATTGCA | |
| AH0097 | SEQ ID NO: 97 | UGCCAUGUUGC | SEQ ID NO: 1277 | CUGCAAUAGCA | SEQ ID NO: 2457 | TGCCATGTTG | 0.226 |
| | | UAUUGCAGGA | | ACAUGGCAGA | | CTATTGCAG | |
| AH0098 | SEQ ID NO: 98 | GCCAUGUUGCU | SEQ ID NO: 1278 | CCUGCAAUAGC | SEQ ID NO: 2458 | GCCATGTTGC | 0.184 |
| | | AUUGCAGGAC | | AACAUGGCAG | | TATTGCAGG | |
| AH0099 | SEQ ID NO: 99 | CCAUGUUGCUA | SEQ ID NO: 1279 | UCCUGCAAUAG | SEQ ID NO: 2459 | CCATGTTGCT | 0.066 |
| | | UUGCAGGACG | | CAACAUGGCA | | ATTGCAGGA | |
| AH0103 | SEQ ID NO: 103 | GUUGCUAUUGC | SEQ ID NO: 1283 | UCCGUCCUGCA | SEQ ID NO: 2463 | GTTGCTATTG | 0.101 |
| | | AGGACGGACC | | AUAGCAACAU | | CAGGACGGA | |
| AH0106 | SEQ ID NO: 106 | GCUAUUGCAGG | SEQ ID NO: 1286 | AGGUCCGUCCU | SEQ ID NO: 2466 | GCTATTGCAG | 0.118 |
| | | ACGGACCUGU | | GCAAUAGCAA | | GACGGACCT | |
| AH0107 | SEQ ID NO: 107 | CUAUUGCAGGA | SEQ ID NO: 1287 | CAGGUCCGUCC | SEQ ID NO: 2467 | CTATTGCAGG | 0.170 |
| | | CGGACCUGUC | | UGCAAUAGCA | | ACGGACCTG | |
| AH0108 | SEQ ID NO: 108 | UAUUGCAGGAC | SEQ ID NO: 1288 | ACAGGUCCGUC | SEQ ID NO: 2468 | TATTGCAGGA | 0.212 |
| | | GGACCUGUCC | | CUGCAAUAGC | | CGGACCTGT | |
| AH0109 | SEQ ID NO: 109 | AUUGCAGGACG | SEQ ID NO: 1289 | GACAGGUCCGU | SEQ ID NO: 2469 | ATTGCAGGAC | 0.210 |
| | | GACCUGUCCC | | CCUGCAAUAG | | GGACCTGTC | |
| AH0112 | SEQ ID NO: 112 | GCAGGACGGAC | SEQ ID NO: 1292 | UGGGACAGGUC | SEQ ID NO: 2472 | GCAGGACGGA | 0.225 |
| | | CUGUCCCAAG | | CGUCCUGCAA | | CCTGTCCCA | |
| AH0114 | SEQ ID NO: 114 | AGGACGGACCU | SEQ ID NO: 1294 | CUUGGGACAGG | SEQ ID NO: 2474 | AGGACGGACC | 0.155 |
| | | GUCCCAAGCC | | UCCGUCCUGC | | TGTCCCAAG | |
| AH0115 | SEQ ID NO: 115 | GGACGGACCUG | SEQ ID NO: 1295 | GCUUGGGACAG | SEQ ID NO: 2475 | GGACGGACCT | 0.073 |
| | | UCCCAAGCCA | | GUCCGUCCUG | | GTCCCAAGC | |
| AH0117 | SEQ ID NO: 117 | ACGGACCUGUC | SEQ ID NO: 1297 | UGGCUUGGGAC | SEQ ID NO: 2477 | ACGGACCTGT | 0.194 |
| | | CCAAGCCAGA | | AGGUCCGUCC | | CCCAAGCCA | |
| AH0118 | SEQ ID NO: 118 | CGGACCUGUCC | SEQ ID NO: 1298 | CUGGCUUGGGA | SEQ ID NO: 2478 | CGGACCTGTC | 0.111 |
| | | CAAGCCAGAU | | CAGGUCCGUC | | CCAAGCCAG | |
| AH0119 | SEQ ID NO: 119 | GGACCUGUCCC | SEQ ID NO: 1299 | UCUGGCUUGGG | SEQ ID NO: 2479 | GGACCTGTCC | 0.057 |
| | | AAGCCAGAUG | | ACAGGUCCGU | | CAAGCCAGA | |
| AH0120 | SEQ ID NO: 120 | GACCUGUCCCA | SEQ ID NO: 1300 | AUCUGGCUUGG | SEQ ID NO: 2480 | GACCTGTCCC | 0.136 |
| | | AGCCAGAUGA | | GACAGGUCCG | | AAGCCAGAT | |
| AH0121 | SEQ ID NO: 121 | ACCUGUCCCAA | SEQ ID NO: 1301 | CAUCUGGCUUG | SEQ ID NO: 2481 | ACCTGTCCCA | 0.298 |
| | | GCCAGAUGAU | | GGACAGGUCC | | AGCCAGATG | |
| AH0122 | SEQ ID NO: 122 | CCUGUCCCAAG | SEQ ID NO: 1302 | UCAUCUGGCUU | SEQ ID NO: 2482 | CCTGTCCCAA | 0.111 |
| | | CCAGAUGAUU | | GGGACAGGUC | | GCCAGATGA | |
| AH0123 | SEQ ID NO: 123 | CUGUCCCAAGC | SEQ ID NO: 1303 | AUCAUCUGGCU | SEQ ID NO: 2483 | CTGTCCCAAG | 0.156 |
| | | CAGAUGAUUU | | UGGGACAGGU | | CCAGATGAT | |
| AH0124 | SEQ ID NO: 124 | UGUCCCAAGCC | SEQ ID NO: 1304 | AAUCAUCUGGC | SEQ ID NO: 2484 | TGTCCCAAGC | 0.098 |
| | | AGAUGAUUUA | | UUGGGACAGG | | CAGATGATT | |
| AH0125 | SEQ ID NO: 125 | GUCCCAAGCCA | SEQ ID NO: 1305 | AAAUCAUCUGG | SEQ ID NO: 2485 | GTCCCAAGCC | 0.050 |
| | | GAUGAUUUAC | | CUUGGGACAG | | AGATGATTT | |
| AH0126 | SEQ ID NO: 126 | UCCCAAGCCAG | SEQ ID NO: 1306 | UAAAUCAUCUG | SEQ ID NO: 2486 | TCCCAAGCCA | 0.063 |
| | | AUGAUUUACC | | GCUUGGGACA | | GATGATTTA | |
| AH0127 | SEQ ID NO: 127 | CCCAAGCCAGA | SEQ ID NO: 1307 | GUAAAUCAUCU | SEQ ID NO: 2487 | CCCAAGCCAG | 0.260 |
| | | UGAUUUACCA | | GGCUUGGGAC | | ATGATTTAC | |
| AH0128 | SEQ ID NO: 123 | CCAAGCCAGAU | SEQ ID NO: 1308 | GGUAAAUCAUC | SEQ ID NO: 2488 | CCAAGCCAGA | 0.326 |
| | | GAUUUACCAU | | UGGCUUGGGA | | TGATTTACC | |
| AH0129 | SEQ ID NO: 129 | CAAGCCAGAUG | SEQ ID NO: 1309 | UGGUAAAUCAU | SEQ ID NO: 2489 | CAAGCCAGAT | 0.092 |
| | | AUUUACCAUU | | CUGGCUUGGG | | GATTTACCA | |
| AH0130 | SEQ ID NO: 133 | AAGCCAGAUGA | SEQ ID NO: 1310 | AUGGUAAAUCA | SEQ ID NO: 2490 | AAGCCAGATG | 0.098 |
| | | UUUACCAUUU | | UCUGGCUUGG | | ATTTACCAT | |
| AH0131 | SEQ ID NO: 131 | AGCCAGAUGAU | SEQ ID NO: 1311 | AAUGGUAAAUC | SEQ ID NO: 2491 | AGCCAGATGA | 0.147 |
| | | UUACCAUUUU | | AUCUGGCUUG | | TTTACCATT | |
| AH0132 | SEQ ID NO: 132 | GCCAGAUGAUU | SEQ ID NO: 1312 | AAAUGGUAAAU | SEQ ID NO: 2492 | GCCAGATGAT | 0.116 |
| | | UACCAUUUUC | | CAUCUGGCUU | | TTACCATTT | |
| AH0133 | SEQ ID NO: 133 | CCAGAUGAUUU | SEQ ID NO: 1313 | AAAAUGGUAAA | SEQ ID NO: 2493 | CCAGATGATT | 0.062 |
| | | ACCAUUUUCC | | UCAUCUGGCU | | TACCATTTT | |
| AH0134 | SEQ ID NO: 134 | CAGAUGAUUUA | SEQ ID NO: 1314 | GAAAAUGGUAA | SEQ ID NO: 2494 | CAGATGATTT | 0.074 |
| | | CCAUUUUCCA | | AUCAUCUGGC | | ACCATTTTC | |
| AH0135 | SEQ ID NO: 135 | AGAUGAUUUAC | SEQ ID NO: 1315 | GGAAAAUGGUA | SEQ ID NO: 2495 | AGATGATTTA | 0.122 |
| | | CAUUUUCCAC | | AAUCAUCUGG | | CCATTTTCC | |
| AH0136 | SEQ ID NO: 136 | GAUGAUUUACC | SEQ ID NO: 1316 | UGGAAAAUGGU | SEQ ID NO: 2496 | GATGATTTAC | 0.114 |
| | | AUUUUCCACA | | AAAUCAUCUG | | CATTTTCCA | |

TABLE 1-3

| double- | | | | | | | |
|---|---|---|---|---|---|---|---|
| stranded | | sense | | antisense | | target | β2GPI |
| nucleic | | strand | | strand | | β2GPI | relative |
| acid | | sequence | | sequence | | mRNA | expression |
| number | SEQ ID NO: | (5′→3′) | SEQ ID NO: | (5′→3′) | SEQ ID NO: | sequence | level |
| AH0137 | SEQ ID NO: 137 | AUGAUUUACCA | SEQ ID NO: 1317 | GUGGAAAAUGG | SEQ ID NO: 2497 | ATGATTTACC | 0.333 |
| | | UUUUCCACAG | | UAAAUCAUCU | | ATTTTCCAC | |
| AH0138 | SEQ ID NO: 138 | UGAUUUACCAU | SEQ ID NO: 1318 | UGUGGAAAAUG | SEQ ID NO: 2498 | TGATTTACCA | 0.210 |
| | | UUUCCACAGU | | GUAAAUCAUC | | TTTTCCACA | |
| AH0139 | SEQ ID NO: 139 | GAUUUACCAUU | SEQ ID NO: 1319 | CUGUGGAAAAU | SEQ ID NO: 2499 | GATTTACCAT | 0.303 |
| | | UUCCACAGUG | | GGUAAAUCAU | | TTTCCACAG | |
| AH0143 | SEQ ID NO: 143 | UACCAUUUUCC | SEQ ID NO: 1323 | ACCACUGUGGA | SEQ ID NO: 2503 | TACCATTTTC | 0.298 |
| | | ACAGUGGUCC | | AAAUGGUAAA | | CACAGTGGT | |
| AH0144 | SEQ ID NO: 144 | ACCAUUUUCCA | SEQ ID NO: 1324 | GACCACUGUGG | SEQ ID NO: 2504 | ACCATTTTCC | 0.155 |
| | | CAGUGGUCCC | | AAAAUGGUAA | | ACAGTGGTC | |
| AH0145 | SEQ ID NO: 145 | CCAUUUUCCAC | SEQ ID NO: 1325 | GGACCACUGUG | SEQ ID NO: 2505 | CCATTTTCCA | 0.305 |
| | | AGUGGUCCCG | | GAAAAUGGUA | | CAGTGGTCC | |
| AH0149 | SEQ ID NO: 149 | UUUCCACAGUG | SEQ ID NO: 1329 | AACGGGACCAC | SEQ ID NO: 2509 | TTTCCACAGT | 0.080 |
| | | GUCCCGUUAA | | UGUGGAAAAU | | GGTCCCGTT | |
| AH0150 | SEQ ID NO: 150 | UUCCACAGUGG | SEQ ID NO: 1330 | UAACGGGACCA | SEQ ID NO: 2510 | TTCCACAGTG | 0.184 |
| | | UCCCGUUAAA | | CUGUGGAAAA | | GTCCCGTTA | |
| AH0151 | SEQ ID NO: 151 | UCCACAGUGGU | SEQ ID NO: 1331 | UUAACGGGACC | SEQ ID NO: 2511 | TCCACAGTGG | 0.164 |
| | | CCCGUUAAAA | | ACUGUGGAAA | | TCCCGTTAA | |
| AH0152 | SEQ ID NO: 152 | CCACAGUGGUC | SEQ ID NO: 1332 | UUUAACGGGAC | SEQ ID NO: 2512 | CCACAGTGGT | 0.060 |
| | | CCGUUAAAAA | | CACUGUGGAA | | CCCGTTAAA | |
| AH0153 | SEQ ID NO: 153 | CACAGUGGUCC | SEQ ID NO: 1333 | UUUUAACGGGA | SEQ ID NO: 2513 | CACAGTGGTC | 0.198 |
| | | CGUUAAAAAC | | CCACUGUGGA | | CCGTTAAAA | |
| AH0154 | SEQ ID NO: 154 | ACAGUGGUCCC | SEQ ID NO: 1334 | UUUUUAACGGG | SEQ ID NO: 2514 | ACAGTGGTCC | 0.077 |
| | | GUUAAAAACA | | ACCACUGUGG | | CGTTAAAAA | |
| AH0155 | SEQ ID NO: 155 | CAGUGGUCCCG | SEQ ID NO: 1335 | GUUUUUAACGG | SEQ ID NO: 2515 | CAGTGGTCCC | 0.062 |
| | | UUAAAAACAU | | GACCACUGUG | | GTTAAAAAC | |
| AH0156 | SEQ ID NO: 156 | AGUGGUCCCGU | SEQ ID NO: 1336 | UGUUUUUAACG | SEQ ID NO: 2516 | AGTGGTCCCG | 0.238 |
| | | UAAAAACAUU | | GGACCACUGU | | TTAAAAACA | |
| AH0157 | SEQ ID NO: 157 | GUGGUCCCGUU | SEQ ID NO: 1337 | AUGUUUUUAAC | SEQ ID NO: 2517 | GTGGTCCCGT | 0.130 |
| | | AAAAACAUUC | | GGGACCACUG | | TAAAAACAT | |
| AH0158 | SEQ ID NO: 158 | UGGUCCCGUUA | SEQ ID NO: 1338 | AAUGUUUUUAA | SEQ ID NO: 2518 | TGGTCCCGTT | 0.145 |
| | | AAAACAUUCU | | CGGGACCACU | | AAAAACATT | |
| AH0159 | SEQ ID NO: 159 | GGUCCCGUUAA | SEQ ID NO: 1339 | GAAUGUUUUUA | SEQ ID NO: 2519 | GGTCCCGTTA | 0.266 |
| | | AAACAUUCUA | | ACGGGACCAC | | AAAACATTC | |
| AH0160 | SEQ ID NO: 160 | GUCCCGUUAAA | SEQ ID NO: 1340 | AGAAUGUUUUU | SEQ ID NO: 2520 | GICCCGTTAA | 0.265 |
| | | AACAUUCUAU | | AACGGGACCA | | AAACATTCT | |
| AH0161 | SEQ ID NO: 161 | UCCCGUUAAAA | SEQ ID NO: 1341 | UAGAAUGUUUU | SEQ ID NO: 2521 | TCCCGTTAAA | 0.156 |
| | | ACAUUCUAUG | | UAACGGGACC | | AACATTCTA | |
| AH0162 | SEQ ID NO: 162 | CCCGUUAAAAA | SEQ ID NO: 1342 | AUAGAAUGUUU | SEQ ID NO: 2522 | CCCGTTAAAA | 0.096 |
| | | CAUUCUAUGA | | UUAACGGGAC | | ACATTCTAT | |
| AH0163 | SEQ ID NO: 163 | CCGUUAAAAAC | SEQ ID NO: 1343 | CAUAGAAUGUU | SEQ ID NO: 2523 | CCGTTAAAAA | 0.116 |
| | | AUUCUAUGAG | | UUUAACGGGA | | CATTCTATG | |
| AH0164 | SEQ ID NO: 164 | CGUUAAAAACA | SEQ ID NO: 1344 | UCAUAGAAUGU | SEQ ID NO: 2524 | CGTTAAAAAC | 0.109 |
| | | UUCUAUGAGC | | UUUUAACGGG | | ATTCTATGA | |
| AH0173 | SEQ ID NO: 173 | CAUUCUAUGAG | SEQ ID NO: 1353 | UCUCCUGGCUC | SEQ ID NO: 2533 | CATTCTATGA | 0.131 |
| | | CCAGGAGAAG | | AUAGAAUGUU | | GCCAGGAGA | |
| AH0174 | SEQ ID NO: 174 | AUUCUAUGAGC | SEQ ID NO: 1354 | UUCUCCUGGCU | SEQ ID NO: 2534 | ATTCTATGAG | 0.255 |
| | | CAGGAGAAGA | | CAUAGAAUGU | | CCAGGAGAA | |
| AH0177 | SEQ ID NO: 177 | CUAUGAGCCAG | SEQ ID NO: 1357 | CUCUUCUCCUG | SEQ ID NO: 2537 | CTATGAGCCA | 0.168 |
| | | GAGAAGAGAU | | GCUCAUAGAA | | GGAGAAGAG | |
| AH0178 | SEQ ID NO: 178 | UAUGAGCCAGG | SEQ ID NO: 1358 | UCUCUUCUCCU | SEQ ID NO: 2538 | TATGAGCCAG | 0.319 |
| | | AGAAGAGAUU | | GGCUCAUAGA | | GAGAAGAGA | |
| AH0179 | SEQ ID NO: 179 | AUGAGCCAGGA | SEQ ID NO: 1359 | AUCUCUUCUCC | SEQ ID NO: 2539 | ATGAGCCAGG | 0.260 |
| | | GAAGAGAUUA | | UGGCUCAUAG | | AGAAGAGAT | |
| AH0180 | SEQ ID NO: 180 | UGAGCCAGGAG | SEQ ID NO: 1360 | AAUCUCUUCUC | SEQ ID NO: 2540 | TGAGCCAGGA | 0.128 |
| | | AAGAGAUUAC | | CUGGCUCAUA | | GAAGAGATT | |
| AH0181 | SEQ ID NO: 181 | GAGCCAGGAGA | SEQ ID NO: 1361 | UAAUCUCUUCU | SEQ ID NO: 2541 | GAGCCAGGAG | 0.049 |
| | | AGAGAUUACG | | CCUGGCUCAU | | AAGAGATTA | |
| AH0183 | SEQ ID NO: 183 | GCCAGGAGAAG | SEQ ID NO: 1363 | CGUAAUCUCUU | SEQ ID NO: 2543 | GCCAGGAGAA | 0.083 |
| | | AGAUUACGUA | | CUCCUGGCUC | | GAGATTACG | |
| AH0184 | SEQ ID NO: 184 | CCAGGAGAAGA | SEQ ID NO: 1364 | ACGUAAUCUCU | SEQ ID NO: 2544 | CCAGGAGAAG | 0.066 |
| | | GAUUACGUAU | | UCUCCUGGCU | | AGATTACGT | |
| AH0185 | SEQ ID NO: 185 | CAGGAGAAGAG | SEQ ID NO: 1365 | UACGUAAUCUC | SEQ ID NO: 2545 | CAGGAGAAGA | 0.055 |
| | | AUUACGUAUU | | UUCUCCUGGC | | GATTACGTA | |
| AH0186 | SEQ ID NO: 186 | AGGAGAAGAGA | SEQ ID NO: 1366 | AUACGUAAUCU | SEQ ID NO: 2546 | AGGAGAAGAG | 0.094 |
| | | UUACGUAUUC | | CUUCUCCUGG | | ATTACGTAT | |
| AH0187 | SEQ ID NO: 187 | GGAGAAGAGAU | SEQ ID NO: 1367 | AAUACGUAAUC | SEQ ID NO: 2547 | GGAGAAGAGA | 0.071 |
| | | UACGUAUUCC | | UCUUCUCCUG | | TTACGTATT | |
| AH0188 | SEQ ID NO: 188 | GAGAAGAGAUU | SEQ ID NO: 1368 | GAAUACGUAAU | SEQ ID NO: 2548 | GAGAAGAGAT | 0.069 |
| | | ACGUAUUCCU | | CUCUUCUCCU | | TACGTATTC | |
| AH0189 | SEQ ID NO: 189 | AGAAGAGAUUA | SEQ ID NO: 1369 | GGAAUACGUAA | SEQ ID NO: 2549 | AGAAGAGATT | 0.168 |
| | | CGUAUUCCUG | | UCUCUUCUCC | | ACGTATTCC | |
| AH0190 | SEQ ID NO: 190 | GAAGAGAUUAC | SEQ ID NO: 1370 | AGGAAUACGUA | SEQ ID NO: 2550 | GAAGAGATTA | 0.157 |
| | | GUAUUCCUGC | | AUCUCUUCUC | | CGTATTCCT | |
| AH0193 | SEQ ID NO: 193 | GAGAUUACGUA | SEQ ID NO: 1373 | UGCAGGAAUAC | SEQ ID NO: 2553 | GAGATTACGT | 0.070 |
| | | UUCCUGCAAG | | GUAAUCUCUU | | ATTCCTGCA | |
| AH0194 | SEQ ID NO: 194 | AGAUUACGUAU | SEQ ID NO: 1374 | UUGCAGGAAUA | SEQ ID NO: 2554 | AGATTACGTA | 0.186 |
| | | UCCUGCAAGC | | CGUAAUCUCU | | TTCCTGCAA | |
| AH0195 | SEQ ID NO: 195 | GAUUACGUAUU | SEQ ID NO: 1375 | CUUGCAGGAAU | SEQ ID NO: 2555 | GATTACGTAT | 0.095 |
| | | CCUGCAAGCC | | ACGUAAUCUC | | TCCTGCAAG | |
| AH0199 | SEQ ID NO: 199 | ACGUAUUCCUG | SEQ ID NO: 1379 | CCGGCUUGCAG | SEQ ID NO: 2559 | ACGTATTCCT | 0.294 |
| | | CAAGCCGGGC | | GAAUACGUAA | | GCAAGCCGG | |
| AH0203 | SEQ ID NO: 203 | AUUCCUGCAAG | SEQ ID NO: 1383 | UAGCCCGGCUU | SEQ ID NO: 2563 | ATTCCTGCAA | 0.232 |
| | | CCGGGCUAUG | | GCAGGAAUAC | | GCCGGGCTA | |
| AH0207 | SEQ ID NO: 207 | CUGCAAGCCGG | SEQ ID NO: 1387 | CACAUAGCCCG | SEQ ID NO: 2567 | CTGCAAGCCG | 0.341 |
| | | GCUAUGUGUC | | GCUUGCAGGA | | GGCTATGTG | |
| AH0225 | SEQ ID NO: 225 | GUCCCGAGGAG | SEQ ID NO: 1405 | UCUCAUCCCUC | SEQ ID NO: 2585 | GTCCCGAGGA | 0.212 |
| | | GGAUGAGAAA | | CUCGGGACAC | | GGGATGAGA | |
| AH0226 | SEQ ID NO: 226 | UCCCGAGGAGG | SEQ ID NO: 1406 | UUCUCAUCCCU | SEQ ID NO: 2586 | TCCCGAGGAG | 0.133 |
| | | GAUGAGAAAG | | CCUCGGGACA | | GGATGAGAA | |
| AH0229 | SEQ ID NO: 229 | CGAGGAGGGAU | SEQ ID NO: 1409 | ACUUUCUCAUC | SEQ ID NO: 2589 | CGAGGAGGGA | 0.182 |
| | | GAGAAAGUUU | | CCUCCUCGGG | | TGAGAAAGT | |

TABLE 1-4

| double- | | | | | | | |
|---|---|---|---|---|---|---|---|
| stranded | | sense | | antisense | | target | β2GPI |
| nucleic | | strand | | strand | | β2GPI | relative |
| acid | | sequence | | sequence | | mRNA | expression |
| number | SEQ ID NO: | (5′→3′) | SEQ ID NO: | (5′→3′) | SEQ ID NO: | sequence | level |
| AH0230 | SEQ ID NO: 230 | GAGGAGGGAUG | SEQ ID NO: 1410 | AACUUUCUCAU | SEQ ID NO: 2590 | GAGGAGGGAT | 0.290 |
| | | AGAAAGUUUA | | CCCUCCUCGG | | GAGAAAGTT | |
| AH0231 | SEQ ID NO: 231 | AGGAGGGAUGA | SEQ ID NO: 1411 | AAACUUUCUCA | SEQ ID NO: 2591 | AGGAGGGATG | 0.149 |
| | | GAAAGUUUAU | | UCCCUCCUCG | | AGAAAGTTT | |
| AH0232 | SEQ ID NO: 232 | GGAGGGAUGAG | SEQ ID NO: 1412 | UAAACUUUCUC | SEQ ID NO: 2592 | GGAGGGATGA | 0.080 |
| | | AAAGUUUAUC | | AUCCCUCCUC | | GAAAGTTTA | |
| AH0233 | SEQ ID NO: 233 | GAGGGAUGAGA | SEQ ID NO: 1413 | AUAAACUUUCU | SEQ ID NO: 2593 | GAGGGATGAG | 0.096 |
| | | AAGUUUAUCU | | CAUCCCUCCU | | AAAGTTTAT | |
| AH0234 | SEQ ID NO: 234 | AGGGAUGAGAA | SEQ ID NO: 1414 | GAUAAACUUUC | SEQ ID NO: 2594 | AGGGATGAGA | 0.252 |
| | | AGUUUAUCUG | | UCAUCCCUCC | | AAGTTTATC | |
| AH0235 | SEQ ID NO: 235 | GGGAUGAGAAA | SEQ ID NO: 1415 | AGAUAAACUUU | SEQ ID NO: 2595 | GGGATGAGAA | 0.134 |
| | | GUUUAUCUGC | | CUCAUCCCUC | | AGTTTATCT | |
| AH0236 | SEQ ID NO: 236 | GGAUGAGAAAG | SEQ ID NO: 1416 | CAGAUAAACUU | SEQ ID NO: 2596 | GGATGAGAAA | 0.065 |
| | | UUUAUCUGCC | | UCUCAUCCCU | | GTTTATCTG | |
| AH0242 | SEQ ID NO: 242 | GAAAGUUUAUC | SEQ ID NO: 1422 | AGAGGGCAGAU | SEQ ID NO: 2602 | GAAAGTTTAT | 0.318 |
| | | UGCCCUCUCA | | AAACUUUCUC | | CTGCCCTCT | |
| AH0244 | SEQ ID NO: 244 | AAGUUUAUCUG | SEQ ID NO: 1424 | UGAGAGGGCAG | SEQ ID NO: 2604 | AAGTTTATCT | 0.192 |
| | | CCCUCUCACA | | AUAAACUUUC | | GCCCTCTCA | |
| AH0255 | SEQ ID NO: 255 | CCCUCUCACAG | SEQ ID NO: 1435 | CCACAGUCCUG | SEQ ID NO: 2615 | CCCTCTCACA | 0.340 |
| | | GACUGUGGCC | | UGAGAGGGCA | | GGACTGTGG | |
| AH0260 | SEQ ID NO: 260 | UCACAGGACUG | SEQ ID NO: 1440 | AUGGGCCACAG | SEQ ID NO: 2620 | TCACAGGACT | 0.295 |
| | | UGGCCCAUCA | | UCCUGUGAGA | | GTGGCCCAT | |
| AH0262 | SEQ ID NO: 262 | ACAGGACUGUG | SEQ ID NO: 1442 | UGAUGGGCCAC | SEQ ID NO: 2622 | ACAGGACTGT | 0.305 |
| | | GCCCAUCAAC | | AGUCCUGUGA | | GGCCCATCA | |
| AH0265 | SEQ ID NO: 265 | GGACUGUGGCC | SEQ ID NO: 1445 | UGUUGAUGGGC | SEQ ID NO: 2625 | GGACTGTGGC | 0.137 |
| | | CAUCAACACU | | CACAGUCCUG | | CCATCAACA | |
| AH0266 | SEQ ID NO: 266 | GACUGUGGCCC | SEQ ID NO: 1446 | GUGUUGAUGGG | SEQ ID NO: 2626 | GACTGTGGCC | 0.169 |
| | | AUCAACACUC | | CCACAGUCCU | | CATCAACAC | |
| AH0272 | SEQ ID NO: 272 | GGCCCAUCAAC | SEQ ID NO: 1452 | UUCAGAGUGUU | SEQ ID NO: 2632 | GGCCCATCAA | 0.166 |
| | | ACUCUGAAAU | | GAUGGGCCAC | | CACTCTGAA | |
| AH0274 | SEQ ID NO: 274 | CCCAUCAACAC | SEQ ID NO: 1454 | AUUUCAGAGUG | SEQ ID NO: 2634 | CCCATCAACA | 0.253 |
| | | UCUGAAAUGU | | UUGAUGGGCC | | CTCTGAAAT | |
| AH0275 | SEQ ID NO: 275 | CCAUCAACACU | SEQ ID NO: 1455 | CAUUUCAGAGU | SEQ ID NO: 2635 | CCATCAACAC | 0.068 |
| | | CUGAAAUGUA | | GUUGAUGGGC | | TCTGAAATG | |
| AH0276 | SEQ ID NO: 276 | CAUCAACACUC | SEQ ID NO: 1456 | ACAUUUCAGAG | SEQ ID NO: 2636 | CATCAACACT | 0.165 |
| | | UGAAAUGUAC | | UGUUGAUGGG | | CTGAAATGT | |
| AH0277 | SEQ ID NO: 277 | AUCAACACUCU | SEQ ID NO: 1457 | UACAUUUCAGA | SEQ ID NO: 2637 | ATCAACACTC | 0.172 |
| | | GAAAUGUACA | | GUGUUGAUGG | | TGAAATGTA | |
| AH0279 | SEQ ID NO: 279 | CAACACUCUGA | SEQ ID NO: 1459 | UGUACAUUUCA | SEQ ID NO: 2639 | CAACACTCTG | 0.229 |
| | | AAUGUACACC | | GAGUGUUGAU | | AAATGTACA | |
| AH0283 | SEQ ID NO: 283 | ACUCUGAAAUG | SEQ ID NO: 1463 | UGGGUGUACAU | SEQ ID NO: 2643 | ACTCTGAAAT | 0.288 |
| | | UACACCCAGA | | UUCAGAGUGU | | GTACACCCA | |
| AH0285 | SEQ ID NO: 285 | UCUGAAAUGUA | SEQ ID NO: 1465 | UCUGGGUGUAC | SEQ ID NO: 2645 | TCTGAAATGT | 0.305 |
| | | CACCCAGAGU | | AUUUCAGAGU | | ACACCCAGA | |
| AH0288 | SEQ ID NO: 288 | GAAAUGUACAC | SEQ ID NO: 1468 | UACUCUGGGUG | SEQ ID NO: 2648 | GAAATGTACA | 0.221 |
| | | CCAGAGUAUG | | UACAUUUCAG | | CCCAGAGTA | |
| AH0289 | SEQ ID NO: 289 | AAAUGUACACC | SEQ ID NO: 1469 | AUACUCUGGGU | SEQ ID NO: 2649 | AAATGTACAC | 0.297 |
| | | CAGAGUAUGU | | GUACAUUUCA | | CCAGAGTAT | |
| AH0291 | SEQ ID NO: 291 | AUGUACACCCA | SEQ ID NO: 1471 | ACAUACUCUGG | SEQ ID NO: 2651 | ATGTACACCC | 0.209 |
| | | GAGUAUGUCC | | GUGUACAUUU | | AGAGTATGT | |
| AH0294 | SEQ ID NO: 294 | UACACCCAGAG | SEQ ID NO: 1474 | AGGACAUACUC | SEQ ID NO: 2654 | TACACCCAGA | 0.179 |
| | | UAUGUCCUUU | | UGGGUGUACA | | GTATGTCCT | |
| AH0295 | SEQ ID NO: 295 | ACACCCAGAGU | SEQ ID NO: 1475 | AAGGACAUACU | SEQ ID NO: 2655 | ACACCCAGAG | 0.125 |
| | | AUGUCCUUUU | | CUGGGUGUAC | | TATGTCCTT | |
| AH0296 | SEQ ID NO: 296 | CACCCAGAGUA | SEQ ID NO: 1476 | AAAGGACAUAC | SEQ ID NO: 2656 | CACCCAGAGT | 0.076 |
| | | UGUCCUUUUG | | UCUGGGUGUA | | ATGTCCTTT | |
| AH0297 | SEQ ID NO: 297 | ACCCAGAGUAU | SEQ ID NO: 1477 | AAAAGGACAUA | SEQ ID NO: 2657 | ACCCAGAGTA | 0.139 |
| | | GUCCUUUUGC | | CUCUGGGUGU | | TGTCCTTTT | |
| AH0298 | SEQ ID NO: 298 | CCCAGAGUAUG | SEQ ID NO: 1478 | CAAAAGGACAU | SEQ ID NO: 2658 | CCCAGAGTAT | 0.134 |
| | | UCCUUUUGCU | | ACUCUGGGUG | | GTCCTTTTG | |
| AH0300 | SEQ ID NO: 300 | CAGAGUAUGUC | SEQ ID NO: 1480 | AGCAAAAGGAC | SEQ ID NO: 2660 | CAGAGTATGT | 0.125 |
| | | CUUUUGCUGG | | AUACUCUGGG | | CCTTTTGCT | |
| AH0301 | SEQ ID NO: 301 | AGAGUAUGUCC | SEQ ID NO: 1481 | CAGCAAAAGGA | SEQ ID NO: 2661 | AGAGTATGTC | 0.176 |
| | | UUUUGCUGGA | | CAUACUCUGG | | CTTTTGCTG | |
| AH0302 | SEQ ID NO: 302 | GAGUAUGUCCU | SEQ ID NO: 1482 | CCAGCAAAAGG | SEQ ID NO: 2662 | GAGTATGTCC | 0.076 |
| | | UUUGCUGGAA | | ACAUACUCUG | | TTTTGCTGG | |
| AH0303 | SEQ ID NO: 303 | AGUAUGUCCUU | SEQ ID NO: 1483 | UCCAGCAAAAG | SEQ ID NO: 2663 | AGTATGTCCT | 0.083 |
| | | UUGCUGGAAU | | GACAUACUCU | | TTTGCTGGA | |
| AH0304 | SEQ ID NO: 304 | GUAUGUCCUUU | SEQ ID NO: 1484 | UUCCAGCAAAA | SEQ ID NO: 2664 | GTATGTCCTT | 0.156 |
| | | UGCUGGAAUC | | GGACAUACUC | | TTGCTGGAA | |
| AH0306 | SEQ ID NO: 306 | AUGUCCUUUUG | SEQ ID NO: 1486 | GAUUCCAGCAA | SEQ ID NO: 2666 | ATGTCCTTTT | 0.261 |
| | | CUGGAAUCUU | | AAGGACAUAC | | GCTGGAATC | |
| AH0307 | SEQ ID NO: 307 | UGUCCUUUUGC | SEQ ID NO: 1487 | AGAUUCCAGCA | SEQ ID NO: 2667 | TGTCCTTTTG | 0.168 |
| | | UGGAAUCUUA | | AAAGGACAUA | | CTGGAATCT | |
| AH0308 | SEQ ID NO: 308 | GUCCUUUUGCU | SEQ ID NO: 1488 | AAGAUUCCAGC | SEQ ID NO: 2668 | GTCCTTTTGC | 0.076 |
| | | GGAAUCUUAG | | AAAAGGACAU | | TGGAATCTT | |
| AH0309 | SEQ ID NO: 309 | UCCUUUUGCUG | SEQ ID NO: 1489 | UAAGAUUCCAG | SEQ ID NO: 2669 | TCCTTTTGCT | 0.072 |
| | | GAAUCUUAGA | | CAAAAGGACA | | GGAATCTTA | |
| AH0310 | SEQ ID NO: 310 | CCUUUUGCUGG | SEQ ID NO: 1490 | CUAAGAUUCCA | SEQ ID NO: 2670 | CCTTTTGCTG | 0.097 |
| | | AAUCUUAGAA | | GCAAAAGGAC | | GAATCTTAG | |
| AH0311 | SEQ ID NO: 311 | CUUUUGCUGGA | SEQ ID NO: 1491 | UCUAAGAUUCC | SEQ ID NO: 2671 | CTTTTGCTGG | 0.198 |
| | | AUCUUAGAAA | | AGCAAAAGGA | | AATCTTAGA | |
| AH0314 | SEQ ID NO: 314 | UUGCUGGAAUC | SEQ ID NO: 1494 | UUUUCUAAGAU | SEQ ID NO: 2674 | TTGCTGGAAT | 0.139 |
| | | UUAGAAAAUG | | UCCAGCAAAA | | CTTAGAAAA | |
| AH0315 | SEQ ID NO: 315 | UGCUGGAAUCU | SEQ ID NO: 1495 | AUUUUCUAAGA | SEQ ID NO: 2675 | TGCTGGAATC | 0.132 |
| | | UAGAAAAUGG | | UUCCAGCAAA | | TTAGAAAAT | |
| AH0316 | SEQ ID NO: 316 | GCUGGAAUCUU | SEQ ID NO: 1496 | CAUUUUCUAAG | SEQ ID NO: 2676 | GCTGGAATCT | 0.102 |
| | | AGAAAAUGGA | | AUUCCAGCAA | | TAGAAAATG | |
| AH0317 | SEQ ID NO: 317 | CUGGAAUCUUA | SEQ ID NO: 1497 | CCAUUUUCUAA | SEQ ID NO: 2677 | CTGGAATCTT | 0.304 |
| | | GAAAAUGGAG | | GAUUCCAGCA | | AGAAAATGG | |
| AH0318 | SEQ ID NO: 318 | UGGAAUCUUAG | SEQ ID NO: 1498 | UCCAUUUUCUA | SEQ ID NO: 2678 | TGGAATCTTA | 0.122 |
| | | AAAAUGGAGC | | AGAUUCCAGC | | GAAAATGGA | |

TABLE 1-5

| double- | | | | | | | |
|---|---|---|---|---|---|---|---|
| stranded | | sense | | antisense | | target | β2GPI |
| nucleic | | strand | | strand | | β2GPI | relative |
| acid | | sequence | | sequence | | mRNA | expression |
| number | SEQ ID NO: | (5′→3′) | SEQ ID NO: | (5′→3′) | SEQ ID NO: | sequence | level |
| AH0319 | SEQ ID NO: 319 | GGAAUCUUAGA | SEQ ID NO: 1499 | CUCCAUUUUCU | SEQ ID NO: 2679 | GGAATCTTAG | 0.232 |
| | | AAAUGGAGCC | | AAGAUUCCAG | | AAAATGGAG | |
| AH0324 | SEQ ID NO: 324 | CUUAGAAAAUG | SEQ ID NO: 1504 | UACGGCUCCAU | SEQ ID NO: 2684 | CTTAGAAAAT | 0.125 |
| | | GAGCCGUACG | | UUUCUAAGAU | | GGAGCCGTA | |
| AH0327 | SEQ ID NO: 327 | AGAAAAUGGAG | SEQ ID NO: 1507 | GCGUACGGCUC | SEQ ID NO: 2687 | AGAAAATGGA | 0.334 |
| | | CCGUACGCUA | | CAUUUUCUAA | | GCCGTACGC | |
| AH0328 | SEQ ID NO: 328 | GAAAAUGGAGC | SEQ ID NO: 1508 | AGCGUACGGCU | SEQ ID NO: 2688 | GAAAATGGAG | 0.153 |
| | | CGUACGCUAU | | CCAUUUUCUA | | CCGTACGCT | |
| AH0329 | SEQ ID NO: 329 | AAAAUGGAGCC | SEQ ID NO: 1509 | UAGCGUACGGC | SEQ ID NO: 2689 | AAAATGGAGC | 0.063 |
| | | GUACGCUAUA | | UCCAUUUUCU | | CGTACGCTA | |
| AH0330 | SEQ ID NO: 330 | AAAUGGAGCCG | SEQ ID NO: 1510 | AUAGCGUACGG | SEQ ID NO: 2690 | AAATGGAGCC | 0.182 |
| | | UACGCUAUAC | | CUCCAUUUUC | | GTACGCTAT | |
| AH0331 | SEQ ID NO: 331 | AAUGGAGCCGU | SEQ ID NO: 1511 | UAUAGCGUACG | SEQ ID NO: 2691 | AATGGAGCCG | 0.149 |
| | | ACGCUAUACG | | GCUCCAUUUU | | TACGCTATA | |
| AH0334 | SEQ ID NO: 334 | GGAGCCGUACG | SEQ ID NO: 1514 | UCGUAUAGCGU | SEQ ID NO: 2694 | GGAGCCGTAC | 0.164 |
| | | CUAUACGACU | | ACGGCUCCAU | | GCTATACGA | |
| AH0335 | SEQ ID NO: 335 | GAGCCGUACGC | SEQ ID NO: 1515 | GUCGUAUAGCG | SEQ ID NO: 2695 | GAGCCGTACG | 0.181 |
| | | UAUACGACUU | | UACGGCUCCA | | CTATACGAC | |
| AH0336 | SEQ ID NO: 336 | AGCCGUACGCU | SEQ ID NO: 1516 | AGUCGUAUAGC | SEQ ID NO: 2696 | AGCCGTACGC | 0.114 |
| | | AUACGACUUU | | GUACGGCUCC | | TATACGACT | |
| AH0337 | SEQ ID NO: 337 | GCCGUACGCUA | SEQ ID NO: 1517 | AAGUCGUAUAG | SEQ ID NO: 2697 | GCCGTACGCT | 0.106 |
| | | UACGACUUUU | | CGUACGGCUC | | ATACGACTT | |
| AH0338 | SEQ ID NO: 338 | CCGUACGCUAU | SEQ ID NO: 1518 | AAAGUCGUAUA | SEQ ID NO: 2698 | CCGTACGCTA | 0.077 |
| | | ACGACUUUUG | | GCGUACGGCU | | TACGACTTT | |
| AH0339 | SEQ ID NO: 339 | CGUACGCUAUA | SEQ ID NO: 1519 | AAAAGUCGUAU | SEQ ID NO: 2699 | CGTACGCTAT | 0.102 |
| | | CGACUUUUGA | | AGCGUACGGC | | ACGACTTTT | |
| AH0340 | SEQ ID NO: 340 | GUACGCUAUAC | SEQ ID NO: 1520 | CAAAAGUCGUA | SEQ ID NO: 2700 | GTACGCTATA | 0.224 |
| | | GACUUUUGAA | | UAGCGUACGG | | CGACTTTTG | |
| AH0341 | SEQ ID NO: 341 | UACGCUAUACG | SEQ ID NO: 1521 | UCAAAAGUCGU | SEQ ID NO: 2701 | TACGCTATAC | 0.233 |
| | | ACUUUUGAAU | | AUAGCGUACG | | GACTTTTGA | |
| AH0342 | SEQ ID NO: 342 | ACGCUAUACGA | SEQ ID NO: 1522 | UUCAAAAGUCG | SEQ ID NO: 2702 | ACGCTATACG | 0.120 |
| | | CUUUUGAAUA | | UAUAGCGUAC | | ACTTTTGAA | |
| AH0343 | SEQ ID NO: 343 | CGCUAUACGAC | SEQ ID NO: 1523 | AUUCAAAAGUC | SEQ ID NO: 2703 | CGCTATACGA | 0.102 |
| | | UUUUGAAUAU | | GUAUAGCGUA | | CTTTTGAAT | |
| AH0345 | SEQ ID NO: 345 | CUAUACGACUU | SEQ ID NO: 1525 | AUAUUCAAAAG | SEQ ID NO: 2705 | CTATACGACT | 0.086 |
| | | UUGAAUAUCC | | UCGUAUAGCG | | TTTGAATAT | |
| AH0346 | SEQ ID NO: 346 | UAUACGACUUU | SEQ ID NO: 1526 | GAUAUUCAAAA | SEQ ID NO: 2706 | TATACGACTT | 0.220 |
| | | UGAAUAUCCC | | GUCGUAUAGC | | TTGAATATC | |
| AH0349 | SEQ ID NO: 349 | ACGACUUUUGA | SEQ ID NO: 1529 | UGGGAUAUUCA | SEQ ID NO: 2709 | ACGACTTTTG | 0.316 |
| | | AUAUCCCAAC | | AAAGUCGUAU | | AATATCCCA | |
| AH0350 | SEQ ID NO: 350 | CGACUUUUGAA | SEQ ID NO: 1530 | UUGGGAUAUUC | SEQ ID NO: 2710 | CGACTTTTGA | 0.120 |
| | | UAUCCCAACA | | AAAAGUCGUA | | ATATCCCAA | |
| AH0351 | SEQ ID NO: 351 | GACUUUUGAAU | SEQ ID NO: 1531 | GUUGGGAUAUU | SEQ ID NO: 2711 | GACTTTTGAA | 0.230 |
| | | AUCCCAACAC | | CAAAAGUCGU | | TATCCCAAC | |
| AH0352 | SEQ ID NO: 352 | ACUUUUGAAUA | SEQ ID NO: 1532 | UGUUGGGAUAU | SEQ ID NO: 2712 | ACTTTTGAAT | 0.114 |
| | | UCCCAACACG | | UCAAAAGUCG | | ATCCCAACA | |
| AH0355 | SEQ ID NO: 355 | UUUGAAUAUCC | SEQ ID NO: 1535 | UCGUGUUGGGA | SEQ ID NO: 2715 | TTTGAATATC | 0.293 |
| | | CAACACGAUC | | UAUUCAAAAG | | CCAACACGA | |
| AH0356 | SEQ ID NO: 356 | UUGAAUAUCCC | SEQ ID NO: 1536 | AUCGUGUUGGG | SEQ ID NO: 2716 | TTGAATATCC | 0.137 |
| | | AACACGAUCA | | AUAUUCAAAA | | CAACACGAT | |
| AH0357 | SEQ ID NO: 357 | UGAAUAUCCCA | SEQ ID NO: 1537 | GAUCGUGUUGG | SEQ ID NO: 2717 | TGAATATCCC | 0.280 |
| | | ACACGAUCAG | | GAUAUUCAAA | | AACACGATC | |
| AH0358 | SEQ ID NO: 358 | GAAUAUCCCAA | SEQ ID NO: 1538 | UGAUCGUGUUG | SEQ ID NO: 2718 | GAATATCCCA | 0.113 |
| | | CACGAUCAGU | | GGAUAUUCAA | | ACACGATCA | |
| AH0361 | SEQ ID NO: 361 | UAUCCCAACAC | SEQ ID NO: 1541 | AACUGAUCGUG | SEQ ID NO: 2721 | TATCCCAACA | 0.244 |
| | | GAUCAGUUUU | | UUGGGAUAUU | | CGATCAGTT | |
| AH0362 | SEQ ID NO: 362 | AUCCCAACACG | SEQ ID NO: 1542 | AAACUGAUCGU | SEQ ID NO: 2722 | ATCCCAACAC | 0.194 |
| | | AUCAGUUUUU | | GUUGGGAUAU | | GATCAGTTT | |
| AH0363 | SEQ ID NO: 363 | UCCCAACACGA | SEQ ID NO: 1543 | AAAACUGAUCG | SEQ ID NO: 2723 | TCCCAACACG | 0.332 |
| | | UCAGUUUUUC | | UGUUGGGAUA | | ATCAGTTTT | |
| AH0364 | SEQ ID NO: 364 | CCCAACACGAU | SEQ ID NO: 1544 | AAAAACUGAUC | SEQ ID NO: 2724 | CCCAACACGA | 0.171 |
| | | CAGUUUUUCU | | GUGUUGGGAU | | TCAGTTTTT | |
| AH0365 | SEQ ID NO: 365 | CCAACACGAUC | SEQ ID NO: 1545 | GAAAAACUGAU | SEQ ID NO: 2725 | CCAACACGAT | 0.165 |
| | | AGUUUUUCUU | | CGUGUUGGGA | | CAGTTTTTC | |
| AH0366 | SEQ ID NO: 366 | CAACACGAUCA | SEQ ID NO: 1546 | AGAAAAACUGA | SEQ ID NO: 2726 | CAACACGATC | 0.119 |
| | | GUUUUUCUUG | | UCGUGUUGGG | | AGTTTTTCT | |
| AH0367 | SEQ ID NO: 367 | AACACGAUCAG | SEQ ID NO: 1547 | AAGAAAAACUG | SEQ ID NO: 2727 | AACACGATCA | 0.216 |
| | | UUUUUCUUGU | | AUCGUGUUGG | | GTTTTTCTT | |
| AH0369 | SEQ ID NO: 369 | CACGAUCAGUU | SEQ ID NO: 1549 | ACAAGAAAAAC | SEQ ID NO: 2729 | CACGATCAGT | 0.131 |
| | | UUUCUUGUAA | | UGAUCGUGUU | | TTTTCTTGT | |
| AH0370 | SEQ ID NO: 370 | ACGAUCAGUUU | SEQ ID NO: 1550 | UACAAGAAAAA | SEQ ID NO: 2730 | ACGATCAGTT | 0.152 |
| | | UUCUUGUAAC | | CUGAUCGUGU | | TTTCTTGTA | |
| AH0371 | SEQ ID NO: 371 | CGAUCAGUUUU | SEQ ID NO: 1551 | UUACAAGAAAA | SEQ ID NO: 2731 | CGATCAGTTT | 0.077 |
| | | UCUUGUAACA | | ACUGAUCGUG | | TTCTTGTAA | |
| AH0372 | SEQ ID NO: 372 | GAUCAGUUUUU | SEQ ID NO: 1552 | GUUACAAGAAA | SEQ ID NO: 2732 | GATCAGTTTT | 0.185 |
| | | CUUGUAACAC | | AACUGAUCGU | | TCTTGTAAC | |
| AH0373 | SEQ ID NO: 373 | AUCAGUUUUUC | SEQ ID NO: 1553 | UGUUACAAGAA | SEQ ID NO: 2733 | ATCAGTTTTT | 0.141 |
| | | UUGUAACACU | | AAACUGAUCG | | CTTGTAACA | |
| AH0375 | SEQ ID NO: 375 | CAGUUUUUCUU | SEQ ID NO: 1555 | AGUGUUACAAG | SEQ ID NO: 2735 | CAGTTTTTCT | 0.139 |
| | | GUAACACUGG | | AAAAACUGAU | | TGTAACACT | |
| AH0376 | SEQ ID NO: 376 | AGUUUUUCUUG | SEQ ID NO: 1556 | CAGUGUUACAA | SEQ ID NO: 2736 | AGTTTTTCTT | 0.233 |
| | | UAACACUGGG | | GAAAAACUGA | | GTAACACTG | |
| AH0382 | SEQ ID NO: 382 | UCUUGUAACAC | SEQ ID NO: 1562 | AAAACCCAGUG | SEQ ID NO: 2742 | TCTTGTAACA | 0.134 |
| | | UGGGUUUUAU | | UUACAAGAAA | | CTGGGTTTT | |
| AH0383 | SEQ ID NO: 383 | CUUGUAACACU | SEQ ID NO: 1563 | UAAAACCCAGU | SEQ ID NO: 2743 | CTTGTAACAC | 0.134 |
| | | GGGUUUUAUC | | GUUACAAGAA | | TGGGTTTTA | |
| AH0384 | SEQ ID NO: 384 | UUGUAACACUG | SEQ ID NO: 1564 | AUAAAACCCAG | SEQ ID NO: 2744 | TTGTAACACT | 0.074 |
| | | GGUUUUAUCU | | UGUUACAAGA | | GGGTTTTAT | |
| AH0385 | SEQ ID NO: 385 | UGUAACACUGG | SEQ ID NO: 1565 | GAUAAAACCCA | SEQ ID NO: 2745 | TGTAACACTG | 0.246 |
| | | GUUUUAUCUG | | GUGUUACAAG | | GGTTTTATC | |
| AH0386 | SEQ ID NO: 386 | GUAACACUGGG | SEQ ID NO: 1566 | AGAUAAAACCC | SEQ ID NO: 2746 | GTAACACTGG | 0.137 |
| | | UUUUAUCUGA | | AGUGUUACAA | | GTTTTATCT | |

TABLE 1-6

| double- | | | | | | | |
|---|---|---|---|---|---|---|---|
| stranded | | sense | | antisense | | target | β2GPI |
| nucleic | | strand | | strand | | β2GPI | relative |
| acid | | sequence | | sequence | | mRNA | expression |
| number | SEQ ID NO: | (5′→3′) | SEQ ID NO: | (5′→3′) | SEQ ID NO: | sequence | level |
| AH0388 | SEQ ID NO: 388 | AACACUGGGUU | SEQ ID NO: 1568 | UCAGAUAAAAC | SEQ ID NO: 2748 | AACACTGGGT | 0.107 |
| | | UUAUCUGAAU | | CCAGUGUUAC | | TTTATCTGA | |
| AH0389 | SEQ ID NO: 389 | ACACUGGGUUU | SEQ ID NO: 1569 | UUCAGAUAAAA | SEQ ID NO: 2749 | ACACTGGGTT | 0.275 |
| | | UAUCUGAAUG | | CCCAGUGUUA | | TTATCTGAA | |
| AH0390 | SEQ ID NO: 390 | CACUGGGUUUU | SEQ ID NO: 1570 | AUUCAGAUAAA | SEQ ID NO: 2750 | CACTGGGTTT | 0.294 |
| | | AUCUGAAUGG | | ACCCAGUGUU | | TATCTGAAT | |
| AH0392 | SEQ ID NO: 392 | CUGGGUUUUAU | SEQ ID NO: 1572 | CCAUUCAGAUA | SEQ ID NO: 2752 | CTGGGTTTTA | 0.254 |
| | | CUGAAUGGCG | | AAACCCAGUG | | TCTGAATGG | |
| AH0394 | SEQ ID NO: 394 | GGGUUUUAUCU | SEQ ID NO: 1574 | CGCCAUUCAGA | SEQ ID NO: 2754 | GGGTTTTATC | 0.080 |
| | | GAAUGGCGCU | | UAAAACCCAG | | TGAATGGCG | |
| AH0395 | SEQ ID NO: 395 | GGUUUUAUCUG | SEQ ID NO: 1575 | GCGCCAUUCAG | SEQ ID NO: 2755 | GGTTTTATCT | 0.139 |
| | | AAUGGCGCUG | | AUAAAACCCA | | GAATGGCGC | |
| AH0396 | SEQ ID NO: 396 | GUUUUAUCUGA | SEQ ID NO: 1576 | AGCGCCAUUCA | SEQ ID NO: 2756 | GTTTTATCTG | 0.169 |
| | | AUGGCGCUGA | | GAUAAAACCC | | AATGGCGCT | |
| AH0399 | SEQ ID NO: 399 | UUAUCUGAAUG | SEQ ID NO: 1579 | AUCAGCGCCAU | SEQ ID NO: 2759 | TTATCTGAAT | 0.113 |
| | | GCGCUGAUUC | | UCAGAUAAAA | | GGCGCTGAT | |
| AH0402 | SEQ ID NO: 402 | UCUGAAUGGCG | SEQ ID NO: 1582 | AGAAUCAGCGC | SEQ ID NO: 2762 | TCTGAATGGC | 0.335 |
| | | CUGAUUCUGC | | CAUUCAGAUA | | GCTGATTCT | |
| AH0406 | SEQ ID NO: 406 | AAUGGCGCUGA | SEQ ID NO: 1586 | UGGCAGAAUCA | SEQ ID NO: 2766 | AATGGCGCTG | 0.177 |
| | | UUCUGCCAAG | | GCGCCAUUCA | | ATTCTGCCA | |
| AH0409 | SEQ ID NO: 409 | GGCGCUGAUUC | SEQ ID NO: 1589 | ACUUGGCAGAA | SEQ ID NO: 2769 | GGCGCTGATT | 0.189 |
| | | UGCCAAGUGC | | UCAGCGCCAU | | CTGCCAAGT | |
| AH0410 | SEQ ID NO: 410 | GCGCUGAUUCU | SEQ ID NO: 1590 | CACUUGGCAGA | SEQ ID NO: 2770 | GCGCTGATTC | 0.251 |
| | | GCCAAGUGCA | | AUCAGCGCCA | | TGCCAAGTG | |
| AH0411 | SEQ ID NO: 411 | CGCUGAUUCUG | SEQ ID NO: 1591 | GCACUUGGCAG | SEQ ID NO: 2771 | CGCTGATTCT | 0.070 |
| | | CCAAGUGCAC | | AAUCAGCGCC | | GCCAAGTGC | |
| AH0412 | SEQ ID NO: 412 | GCUGAUUCUGC | SEQ ID NO: 1592 | UGCACUUGGCA | SEQ ID NO: 2772 | GCTGATTCTG | 0.104 |
| | | CAAGUGCACU | | GAAUCAGCGC | | CCAAGTGCA | |
| AH0413 | SEQ ID NO: 413 | CUGAUUCUGCC | SEQ ID NO: 1593 | GUGCACUUGGC | SEQ ID NO: 2773 | CTGATTCTGC | 0.217 |
| | | AAGUGCACUG | | AGAAUCAGCG | | CAAGTGCAC | |
| AH0414 | SEQ ID NO: 414 | UGAUUCUGCCA | SEQ ID NO: 1594 | AGUGCACUUGG | SEQ ID NO: 2774 | TGATTCTGCC | 0.301 |
| | | AGUGCACUGA | | CAGAAUCAGC | | AAGTGCACT | |
| AH0415 | SEQ ID NO: 415 | GAUUCUGCCAA | SEQ ID NO: 1595 | CAGUGCACUUG | SEQ ID NO: 2775 | GATTCTGCCA | 0.151 |
| | | GUGCACUGAG | | GCAGAAUCAG | | AGTGCACTG | |
| AH0419 | SEQ ID NO: 419 | CUGCCAAGUGC | SEQ ID NO: 1599 | UCCUCAGUGCA | SEQ ID NO: 2779 | CTGCCAAGTG | 0.097 |
| | | ACUGAGGAAG | | CUUGGCAGAA | | CACTGAGGA | |
| AH0420 | SEQ ID NO: 420 | UGCCAAGUGCA | SEQ ID NO: 1600 | UUCCUCAGUGC | SEQ ID NO: 2780 | TGCCAAGTGC | 0.184 |
| | | CUGAGGAAGG | | ACUUGGCAGA | | ACTGAGGAA | |
| AH0422 | SEQ ID NO: 422 | CCAAGUGCACU | SEQ ID NO: 1602 | CCUUCCUCAGU | SEQ ID NO: 2782 | CCAAGTGCAC | 0.243 |
| | | GAGGAAGGAA | | GCACUUGGCA | | TGAGGAAGG | |
| AH0423 | SEQ ID NO: 423 | CAAGUGCACUG | SEQ ID NO: 1603 | UCCUUCCUCAG | SEQ ID NO: 2783 | CAAGTGCACT | 0.095 |
| | | AGGAAGGAAA | | UGCACUUGGC | | GAGGAAGGA | |
| AH0424 | SEQ ID NO: 424 | AAGUGCACUGA | SEQ ID NO: 1604 | UUCCUUCCUCA | SEQ ID NO: 2784 | AAGTGCACTG | 0.166 |
| | | GGAAGGAAAA | | GUGCACUUGG | | AGGAAGGAA | |
| AH0425 | SEQ ID NO: 425 | AGUGCACUGAG | SEQ ID NO: 1605 | UUUCCUUCCUC | SEQ ID NO: 2785 | AGTGCACTGA | 0.084 |
| | | GAAGGAAAAU | | AGUGCACUUG | | GGAAGGAAA | |
| AH0426 | SEQ ID NO: 426 | GUGCACUGAGG | SEQ ID NO: 1606 | UUUUCCUUCCU | SEQ ID NO: 2786 | GTGCACTGAG | 0.299 |
| | | AAGGAAAAUG | | CAGUGCACUU | | GAAGGAAAA | |
| AH0427 | SEQ ID NO: 427 | UGCACUGAGGA | SEQ ID NO: 1607 | AUUUUCCUUCC | SEQ ID NO: 2787 | TGCACTGAGG | 0.236 |
| | | AGGAAAAUGG | | UCAGUGCACU | | AAGGAAAAT | |
| AH0436 | SEQ ID NO: 436 | GAAGGAAAAUG | SEQ ID NO: 1616 | CCGGGCUCCAU | SEQ ID NO: 2796 | GAAGGAAAAT | 0.337 |
| | | GAGCCCGGAG | | UUUCCUUCCU | | GGAGCCCGG | |
| AH0449 | SEQ ID NO: 449 | GCCCGGAGCUU | SEQ ID NO: 1629 | CAGACAGGAAG | SEQ ID NO: 2809 | GCCCGGAGCT | 0.166 |
| | | CCUGUCUGUG | | CUCCGGGCUC | | TCCTGTCTG | |
| AH0450 | SEQ ID NO: 450 | CCCGGAGCUUC | SEQ ID NO: 1630 | ACAGACAGGAA | SEQ ID NO: 2810 | CCCGGAGCTT | 0.138 |
| | | CUGUCUGUGC | | GCUCCGGGCU | | CCTGTCTGT | |
| AH0453 | SEQ ID NO: 453 | GGAGCUUCCUG | SEQ ID NO: 1633 | AGCACAGACAG | SEQ ID NO: 2813 | GGAGCTTCCT | 0.128 |
| | | UCUGUGCUCC | | GAAGCUCCGG | | GTCTGTGCT | |
| AH0454 | SEQ ID NO: 454 | GAGCUUCCUGU | SEQ ID NO: 1634 | GAGCACAGACA | SEQ ID NO: 2814 | GAGCTTCCTG | 0.203 |
| | | CUGUGCUCCC | | GGAAGCUCCG | | TCTGTGCTC | |
| AH0457 | SEQ ID NO: 457 | CUUCCUGUCUG | SEQ ID NO: 1637 | UGGGAGCACAG | SEQ ID NO: 2817 | CTTCCTGTCT | 0.244 |
| | | UGCUCCCAUC | | ACAGGAAGCU | | GTGCTCCCA | |
| AH0461 | SEQ ID NO: 461 | CUGUCUGUGCU | SEQ ID NO: 1641 | AUGAUGGGAGC | SEQ ID NO: 2821 | CTGTCTGTGC | 0.306 |
| | | CCCAUCAUCU | | ACAGACAGGA | | TCCCATCAT | |
| AH0463 | SEQ ID NO: 463 | GUCUGUGCUCC | SEQ ID NO: 1643 | AGAUGAUGGGA | SEQ ID NO: 2823 | GTCTGTGCTC | 0.257 |
| | | CAUCAUCUGC | | GCACAGACAG | | CCATCATCT | |
| AH0472 | SEQ ID NO: 472 | CCCAUCAUCUG | SEQ ID NO: 1652 | GUGGAGGGCAG | SEQ ID NO: 2832 | CCCATCATCT | 0.196 |
| | | CCCUCCACCA | | AUGAUGGGAG | | GCCCTCCAC | |
| AH0475 | SEQ ID NO: 475 | AUCAUCUGCCC | SEQ ID NO: 1655 | AUGGUGGAGGG | SEQ ID NO: 2835 | ATCATCTGCC | 0.250 |
| | | UCCACCAUCC | | CAGAUGAUGG | | CTCCACCAT | |
| AH0476 | SEQ ID NO: 476 | UCAUCUGCCCU | SEQ ID NO: 1656 | GAUGGUGGAGG | SEQ ID NO: 2836 | TCATCTGCCC | 0.249 |
| | | CCACCAUCCA | | GCAGAUGAUG | | TCCACCATC | |
| AH0480 | SEQ ID NO: 480 | CUGCCCUCCAC | SEQ ID NO: 1660 | UAUGGAUGGUG | SEQ ID NO: 2840 | CTGCCCTCCA | 0.291 |
| | | CAUCCAUACC | | GAGGGCAGAU | | CCATCCATA | |
| AH0484 | SEQ ID NO: 484 | CCUCCACCAUC | SEQ ID NO: 1664 | UAGGUAUGGAU | SEQ ID NO: 2844 | CCTCCACCAT | 0.113 |
| | | CAUACCUACG | | GGUGGAGGGC | | CCATACCTA | |
| AH0487 | SEQ ID NO: 487 | CCACCAUCCAU | SEQ ID NO: 1667 | ACGUAGGUAUG | SEQ ID NO: 2847 | CCACCATCCA | 0.213 |
| | | ACCUACGUUU | | GAUGGUGGAG | | TACCTACGT | |
| AH0488 | SEQ ID NO: 488 | CACCAUCCAUA | SEQ ID NO: 1668 | AACGUAGGUAU | SEQ ID NO: 2848 | CACCATCCAT | 0.210 |
| | | CCUACGUUUG | | GGAUGGUGGA | | ACCTACGTT | |
| AH0489 | SEQ ID NO: 489 | ACCAUCCAUAC | SEQ ID NO: 1669 | AAACGUAGGUA | SEQ ID NO: 2849 | ACCATCCATA | 0.160 |
| | | CUACGUUUGC | | UGGAUGGUGG | | CCTACGTTT | |
| AH0490 | SEQ ID NO: 490 | CCAUCCAUACC | SEQ ID NO: 1670 | CAAACGUAGGU | SEQ ID NO: 2850 | CCATCCATAC | 0.171 |
| | | UACGUUUGCA | | AUGGAUGGUG | | CTACGTTTG | |
| AH0491 | SEQ ID NO: 491 | CAUCCAUACCU | SEQ ID NO: 1671 | GCAAACGUAGG | SEQ ID NO: 2851 | CATCCATACC | 0.078 |
| | | ACGUUUGCAA | | UAUGGAUGGU | | TACGTTTGC | |
| AH0492 | SEQ ID NO: 492 | AUCCAUACCUA | SEQ ID NO: 1672 | UGCAAACGUAG | SEQ ID NO: 2852 | ATCCATACCT | 0.153 |
| | | CGUUUGCAAC | | GUAUGGAUGG | | ACGTTTGCA | |
| AH0493 | SEQ ID NO: 493 | UCCAUACCUAC | SEQ ID NO: 1673 | UUGCAAACGUA | SEQ ID NO: 2853 | TCCATACCTA | 0.157 |
| | | GUUUGCAACA | | GGUAUGGAUG | | CGTTTGCAA | |
| AH0495 | SEQ ID NO: 495 | CAUACCUACGU | SEQ ID NO: 1675 | UGUUGCAAACG | SEQ ID NO: 2855 | CATACCTACG | 0.161 |
| | | UUGCAACACU | | UAGGUAUGGA | | TTTGCAACA | |

TABLE 1-7

| double- | | | | | | | |
|---|---|---|---|---|---|---|---|
| stranded | | sense | | antisense | | target | β2GPI |
| nucleic | | strand | | strand | | β2GPI | relative |
| acid | | sequence | | sequence | | mRNA | expression |
| number | SEQ ID NO: | (5′→3′) | SEQ ID NO: | (5′→3′) | SEQ ID NO: | sequence | level |
| AH0498 | SEQ ID NO: 498 | ACCUACGUUUG | SEQ ID NO: 1678 | AAGUGUUGCAA | SEQ ID NO: 2858 | ACCTACGTTT | 0.214 |
| | | CAACACUUCG | | ACGUAGGUAU | | GCAACACTT | |
| AH0499 | SEQ ID NO: 499 | CCUACGUUUGC | SEQ ID NO: 1679 | GAAGUGUUGCA | SEQ ID NO: 2859 | CCTACGTTTG | 0.213 |
| | | AACACUUCGU | | AACGUAGGUA | | CAACACTTC | |
| AH0500 | SEQ ID NO: 500 | CUACGUUUGCA | SEQ ID NO: 1680 | CGAAGUGUUGC | SEQ ID NO: 2860 | CTACGTTTGC | 0.150 |
| | | ACACUUCGUG | | AAACGUAGGU | | AACACTTCG | |
| AH0501 | SEQ ID NO: 501 | UACGUUUGCAA | SEQ ID NO: 1681 | ACGAAGUGUUG | SEQ ID NO: 2861 | TACGTTTGCA | 0.201 |
| | | CACUUCGUGU | | CAAACGUAGG | | ACACTTCGT | |
| AH0502 | SEQ ID NO: 502 | ACGUUUGCAAC | SEQ ID NO: 1682 | CACGAAGUGUU | SEQ ID NO: 2862 | ACGTTTGCAA | 0.159 |
| | | ACUUCGUGUU | | GCAAACGUAG | | CACTTCGTG | |
| AH0503 | SEQ ID NO: 503 | CGUUUGCAACA | SEQ ID NO: 1683 | ACACGAAGUGU | SEQ ID NO: 2863 | CGTTTGCAAC | 0.126 |
| | | CUUCGUGUUU | | UGCAAACGUA | | ACTTCGTGT | |
| AH0504 | SEQ ID NO: 504 | GUUUGCAACAC | SEQ ID NO: 1684 | AACACGAAGUG | SEQ ID NO: 2864 | GTTTGCAACA | 0.055 |
| | | UUCGUGUUUA | | UUGCAAACGU | | CTTCGTGTT | |
| AH0505 | SEQ ID NO: 505 | UUUGCAACACU | SEQ ID NO: 1685 | AAACACGAAGU | SEQ ID NO: 2865 | TTTGCAACAC | 0.170 |
| | | UCGUGUUUAU | | GUUGCAAACG | | TTCGTGTTT | |
| AH0506 | SEQ ID NO: 506 | UUGCAACACUU | SEQ ID NO: 1686 | UAAACACGAAG | SEQ ID NO: 2866 | TTGCAACACT | 0.076 |
| | | CGUGUUUAUA | | UGUUGCAAAC | | TCGTGTTTA | |
| AH0507 | SEQ ID NO: 507 | UGCAACACUUC | SEQ ID NO: 1687 | AUAAACACGAA | SEQ ID NO: 2867 | TGCAACACTT | 0.091 |
| | | GUGUUUAUAA | | GUGUUGCAAA | | CGTGTTTAT | |
| AH0508 | SEQ ID NO: 508 | GCAACACUUCG | SEQ ID NO: 1688 | UAUAAACACGA | SEQ ID NO: 2868 | GCAACACTTC | 0.146 |
| | | UGUUUAUAAG | | AGUGUUGCAA | | GTGTTTATA | |
| AH0509 | SEQ ID NO: 509 | CAACACUUCGU | SEQ ID NO: 1689 | UUAUAAACACG | SEQ ID NO: 2869 | CAACACTTCG | 0.125 |
| | | GUUUAUAAGC | | AAGUGUUGCA | | TGTTTATAA | |
| AH0510 | SEQ ID NO: 510 | AACACUUCGUG | SEQ ID NO: 1690 | CUUAUAAACAC | SEQ ID NO: 2870 | AACACTTCGT | 0.330 |
| | | UUUAUAAGCC | | GAAGUGUUGC | | GTTTATAAG | |
| AH0513 | SEQ ID NO: 513 | ACUUCGUGUUU | SEQ ID NO: 1693 | UGGCUUAUAAA | SEQ ID NO: 2873 | ACTTCGTGTT | 0.119 |
| | | AUAAGCCAUC | | CACGAAGUGU | | TATAAGCCA | |
| AH0514 | SEQ ID NO: 514 | CUUCGUGUUUA | SEQ ID NO: 1694 | AUGGCUUAUAA | SEQ ID NO: 2874 | CTTCGTGTTT | 0.118 |
| | | UAAGCCAUCA | | ACACGAAGUG | | ATAAGCCAT | |
| AH0518 | SEQ ID NO: 518 | GUGUUUAUAAG | SEQ ID NO: 1698 | GCUGAUGGCUU | SEQ ID NO: 2878 | GTGTTTATAA | 0.233 |
| | | CCAUCAGCUG | | AUAAACACGA | | GCCATCAGC | |
| AH0519 | SEQ ID NO: 519 | UGUUUAUAAGC | SEQ ID NO: 1699 | AGCUGAUGGCU | SEQ ID NO: 2879 | TGTTTATAAG | 0.297 |
| | | CAUCAGCUGG | | UAUAAACACG | | CCATCAGCT | |
| AH0520 | SEQ ID NO: 520 | GUUUAUAAGCC | SEQ ID NO: 1700 | CAGCUGAUGGC | SEQ ID NO: 2880 | GTTTATAAGC | 0.216 |
| | | AUCAGCUGGA | | UUAUAAACAC | | CATCAGCTG | |
| AH0526 | SEQ ID NO: 526 | AAGCCAUCAGC | SEQ ID NO: 1706 | UGUUUCCAGCU | SEQ ID NO: 2886 | AAGCCATCAG | 0.299 |
| | | UGGAAACAAU | | GAUGGCUUAU | | CTGGAAACA | |
| AH0527 | SEQ ID NO: 527 | AGCCAUCAGCU | SEQ ID NO: 1707 | UUGUUUCCAGC | SEQ ID NO: 2887 | AGCCATCAGC | 0.258 |
| | | GGAAACAAUU | | UGAUGGCUUA | | TGGAAACAA | |
| AH0528 | SEQ ID NO: 528 | GCCAUCAGCUG | SEQ ID NO: 1708 | AUUGUUUCCAG | SEQ ID NO: 2888 | GCCATCAGCT | 0.091 |
| | | GAAACAAUUC | | CUGAUGGCUU | | GGAAACAAT | |
| AH0529 | SEQ ID NO: 529 | CCAUCAGCUGG | SEQ ID NO: 1709 | AAUUGUUUCCA | SEQ ID NO: 2889 | CCATCAGCTG | 0.067 |
| | | AAACAAUUCC | | GCUGAUGGCU | | GAAACAATT | |
| AH0530 | SEQ ID NO: 530 | CAUCAGCUGGA | SEQ ID NO: 1710 | GAAUUGUUUCC | SEQ ID NO: 2890 | CATCAGCTGG | 0.229 |
| | | AACAAUUCCC | | AGCUGAUGGC | | AAACAATTC | |
| AH0534 | SEQ ID NO: 534 | AGCUGGAAACA | SEQ ID NO: 1714 | GAGGGAAUUGU | SEQ ID NO: 2894 | AGCTGGAAAC | 0.183 |
| | | AUUCCCUCUA | | UUCCAGCUGA | | AATTCCCTC | |
| AH0535 | SEQ ID NO: 535 | GCUGGAAACAA | SEQ ID NO: 1715 | AGAGGGAAUUG | SEQ ID NO: 2895 | GCTGGAAACA | 0.202 |
| | | UUCCCUCUAU | | UUUCCAGCUG | | ATTCCCTCT | |
| AH0538 | SEQ ID NO: 538 | GGAAACAAUUC | SEQ ID NO: 1718 | GAUAGAGGGAA | SEQ ID NO: 2898 | GGAAACAATT | 0.245 |
| | | CCUCUAUCGG | | UUGUUUCCAG | | CCCTCTATC | |
| AH0542 | SEQ ID NO: 542 | ACAAUUCCCUC | SEQ ID NO: 1722 | UCCCGAUAGAG | SEQ ID NO: 2902 | ACAATTCCCT | 0.102 |
| | | UAUCGGGACA | | GGAAUUGUUU | | CTATCGGGA | |
| AH0549 | SEQ ID NO: 549 | CCUCUAUCGGG | SEQ ID NO: 1729 | UGCUGUGUCCC | SEQ ID NO: 2909 | CCTCTATCGG | 0.275 |
| | | ACACAGCAGU | | GAUAGAGGGA | | GACACAGCA | |
| AH0552 | SEQ ID NO: 552 | CUAUCGGGACA | SEQ ID NO: 1732 | AACUGCUGUGU | SEQ ID NO: 2912 | CTATCGGGAC | 0.230 |
| | | CAGCAGUUUU | | CCCGAUAGAG | | ACAGCAGTT | |
| AH0553 | SEQ ID NO: 553 | UAUCGGGACAC | SEQ ID NO: 1733 | AAACUGCUGUG | SEQ ID NO: 2913 | TATCGGGACA | 0.289 |
| | | AGCAGUUUUU | | UCCCGAUAGA | | CAGCAGTTT | |
| AH0554 | SEQ ID NO: 554 | AUCGGGACACA | SEQ ID NO: 1734 | AAAACUGCUGU | SEQ ID NO: 2914 | ATCGGGACAC | 0.324 |
| | | GCAGUUUUUG | | GUCCCGAUAG | | AGCAGTTTT | |
| AH0555 | SEQ ID NO: 555 | UCGGGACACAG | SEQ ID NO: 1735 | AAAAACUGCUG | SEQ ID NO: 2915 | TCGGGACACA | 0.203 |
| | | CAGUUUUUGA | | UGUCCCGAUA | | GCAGTTTTT | |
| AH0557 | SEQ ID NO: 557 | GGGACACAGCA | SEQ ID NO: 1737 | UCAAAAACUGC | SEQ ID NO: 2917 | GGGACACAGC | 0.208 |
| | | GUUUUUGAAU | | UGUGUCCCGA | | AGTTTTTGA | |
| AH0558 | SEQ ID NO: 558 | GGACACAGCAG | SEQ ID NO: 1738 | UUCAAAAACUG | SEQ ID NO: 2918 | GGACACAGCA | 0.237 |
| | | UUUUUGAAUG | | CUGUGUCCCG | | GTTTTTGAA | |
| AH0559 | SEQ ID NO: 559 | GACACAGCAGU | SEQ ID NO: 1739 | AUUCAAAAACU | SEQ ID NO: 2919 | GACACAGCAG | 0.226 |
| | | UUUUGAAUGU | | GCUGUGUCCC | | TTTTTGAAT | |
| AH0561 | SEQ ID NO: 561 | CACAGCAGUUU | SEQ ID NO: 1741 | ACAUUCAAAAA | SEQ ID NO: 2921 | CACAGCAGTT | 0.151 |
| | | UUGAAUGUUU | | CUGCUGUGUC | | TTTGAATGT | |
| AH0562 | SEQ ID NO: 562 | ACAGCAGUUUU | SEQ ID NO: 1742 | AACAUUCAAAA | SEQ ID NO: 2922 | ACAGCAGTTT | 0.096 |
| | | UGAAUGUUUG | | ACUGCUGUGU | | TTGAATGTT | |
| AH0563 | SEQ ID NO: 563 | CAGCAGUUUUU | SEQ ID NO: 1743 | AAACAUUCAAA | SEQ ID NO: 2923 | CAGCAGTTTT | 0.077 |
| | | GAAUGUUUGC | | AACUGCUGUG | | TGAATGTTT | |
| AH0564 | SEQ ID NO: 564 | AGCAGUUUUUG | SEQ ID NO: 1744 | CAAACAUUCAA | SEQ ID NO: 2924 | AGCAGTTTTT | 0.206 |
| | | AAUGUUUGCC | | AAACUGCUGU | | GAATGTTTG | |
| AH0565 | SEQ ID NO: 565 | GCAGUUUUUGA | SEQ ID NO: 1745 | GCAAACAUUCA | SEQ ID NO: 2925 | GCAGTTTTTG | 0.080 |
| | | AUGUUUGCCA | | AAAACUGCUG | | AATGTTTGC | |
| AH0567 | SEQ ID NO: 567 | AGUUUUUGAAU | SEQ ID NO: 1747 | UGGCAAACAUU | SEQ ID NO: 2927 | AGTTTTTGAA | 0.078 |
| | | GUUUGCCACA | | CAAAAACUGC | | TGTTTGCCA | |
| AH0568 | SEQ ID NO: 568 | GUUUUUGAAUG | SEQ ID NO: 1748 | GUGGCAAACAU | SEQ ID NO: 2928 | GTTTTTGAAT | 0.250 |
| | | UUUGCCACAA | | UCAAAAACUG | | GTTTGCCAC | |
| AH0570 | SEQ ID NO: 570 | UUUUGAAUGUU | SEQ ID NO: 1750 | UUGUGGCAAAC | SEQ ID NO: 2930 | TTTTGAATGT | 0.286 |
| | | UGCCACAACA | | AUUCAAAAAC | | TTGCCACAA | |
| AH0572 | SEQ ID NO: 572 | UUGAAUGUUUG | SEQ ID NO: 1752 | UGUUGUGGCAA | SEQ ID NO: 2932 | TTGAATGTTT | 0.152 |
| | | CCACAACAUG | | ACAUUCAAAA | | GCCACAACA | |
| AH0573 | SEQ ID NO: 573 | UGAAUGUUUGC | SEQ ID NO: 1753 | AUGUUGUGGCA | SEQ ID NO: 2933 | TGAATGTTTG | 0.266 |
| | | CACAACAUGC | | AACAUUCAAA | | CCACAACAT | |
| AH0574 | SEQ ID NO: 574 | GAAUGUUUGCC | SEQ ID NO: 1754 | CAUGUUGUGGC | SEQ ID NO: 2934 | GAATGTTTGC | 0.142 |
| | | ACAACAUGCG | | AAACAUUCAA | | CACAACATG | |

TABLE 1-8

| double- | | | | | | | |
|---|---|---|---|---|---|---|---|
| stranded | | sense | | antisense | | target | β2GPI |
| nucleic | | strand | | strand | | β2GPI | relative |
| acid | | sequence | | sequence | | mRNA | expression |
| number | SEQ ID NO: | (5′→3′) | SEQ ID NO: | (5′→3′) | SEQ ID NO: | sequence | level |
| AH0578 | SEQ ID NO: 578 | GUUUGCCACAA | SEQ ID NO: 1758 | AUCGCAUGUUG | SEQ ID NO: 2938 | GTTTGCCACA | 0.120 |
| | | CAUGCGAUGU | | UGGCAAACAU | | ACATGCGAT | |
| AH0582 | SEQ ID NO: 582 | GCCACAACAUG | SEQ ID NO: 1762 | AAACAUCGCAU | SEQ ID NO: 2942 | GCCACAACAT | 0.208 |
| | | CGAUGUUUGG | | AGUUGUGGCA | | GCGATGTTT | |
| AH0583 | SEQ ID NO: 583 | CCACAACAUGC | SEQ ID NO: 1763 | CAAACAUCGCA | SEQ ID NO: 2943 | CCACAACATG | 0.222 |
| | | GAUGUUUGGA | | UGUUGUGGCA | | CGATGTTTG | |
| AH0585 | SEQ ID NO: 585 | ACAACAUGCGA | SEQ ID NO: 1765 | UCCAAACAUCG | SEQ ID NO: 2945 | ACAACATGCG | 0.188 |
| | | UGUUUGGAAA | | CAUGUUGUGG | | ATGTTTGGA | |
| AH0586 | SEQ ID NO: 586 | CAACAUGCGAU | SEQ ID NO: 1766 | UUCCAAACAUC | SEQ ID NO: 2946 | CAACATGCGA | 0.151 |
| | | GUUUGGAAAU | | GCAUGUUGUG | | TGTTTGGAA | |
| AH0588 | SEQ ID NO: 588 | ACAUGCGAUGU | SEQ ID NO: 1768 | AUUUCCAAACA | SEQ ID NO: 2948 | ACATGCGATG | 0.261 |
| | | UUGGAAAUGA | | UCGCAUGUUG | | TTTGGAAAT | |
| AH0590 | SEQ ID NO: 590 | AUGCGAUGUUU | SEQ ID NO: 1770 | UCAUUUCCAAA | SEQ ID NO: 2950 | ATGCGATGTT | 0.248 |
| | | GGAAAUGAUA | | CAUCGCAUGU | | TGGAAATGA | |
| AH0591 | SEQ ID NO: 591 | UGCGAUGUUUG | SEQ ID NO: 1771 | AUCAUUUCCAA | SEQ ID NO: 2951 | TGCGATGTTT | 0.183 |
| | | GAAAUGAUAC | | ACAUCGCAUG | | GGAAATGAT | |
| AH0592 | SEQ ID NO: 592 | GCGAUGUUUGG | SEQ ID NO: 1772 | UAUCAUUUCCA | SEQ ID NO: 2952 | GCGATGTTTG | 0.098 |
| | | AAAUGAUACA | | AACAUCGCAU | | GAAATGATA | |
| AH0593 | SEQ ID NO: 593 | CGAUGUUUGGA | SEQ ID NO: 1773 | GUAUCAUUUCC | SEQ ID NO: 2953 | CGATGTTTGG | 0.135 |
| | | AAUGAUACAA | | AAACAUCGCA | | AAATGATAC | |
| AH0594 | SEQ ID NO: 594 | GAUGUUUGGAA | SEQ ID NO: 1774 | UGUAUCAUUUC | SEQ ID NO: 2954 | GATGTTTGGA | 0.114 |
| | | AUGAUACAAU | | CAAACAUCGC | | AATGATACA | |
| AH0595 | SEQ ID NO: 595 | AUGUUUGGAAA | SEQ ID NO: 1775 | UUGUAUCAUUU | SEQ ID NO: 2955 | ATGTTTGGAA | 0.333 |
| | | UGAUACAAUU | | CCAAACAUCG | | ATGATACAA | |
| AH0597 | SEQ ID NO: 597 | GUUUGGAAAUG | SEQ ID NO: 1777 | AAUUGUAUCAU | SEQ ID NO: 2957 | GTTTGGAAAT | 0.143 |
| | | AUACAAUUAC | | UUCCAAACAU | | GATACAATT | |
| AH0598 | SEQ ID NO: 598 | UUUGGAAAUGA | SEQ ID NO: 1778 | UAAUUGUAUCA | SEQ ID NO: 2958 | TTIGGAAATG | 0.166 |
| | | UACAAUUACC | | UUUCCAAACA | | ATACAATTA | |
| AH0601 | SEQ ID NO: 601 | GGAAAUGAUAC | SEQ ID NO: 1781 | AGGUAAUUGUA | SEQ ID NO: 2961 | GGAAATGATA | 0.177 |
| | | AAUUACCUGC | | UCAUUUCCAA | | CAATTACCT | |
| AH0607 | SEQ ID NO: 607 | GAUACAAUUAC | SEQ ID NO: 1787 | UCGUGCAGGUA | SEQ ID NO: 2967 | GATACAATTA | 0.093 |
| | | CUGCACGACA | | AUUGUAUCAU | | CCTGCACGA | |
| AH0609 | SEQ ID NO: 609 | UACAAUUACCU | SEQ ID NO: 1789 | UGUCGUGCAGG | SEQ ID NO: 2969 | TACAATTACC | 0.159 |
| | | GCACGACACA | | UAAUUGUAUC | | TGCACGACA | |
| AH0610 | SEQ ID NO: 610 | ACAAUUACCUG | SEQ ID NO: 1790 | GUGUCGUGCAG | SEQ ID NO: 2970 | ACAATTACCT | 0.159 |
| | | CACGACACAU | | GUAAUUGUAU | | GCACGACAC | |
| AH0611 | SEQ ID NO: 611 | CAAUUACCUGC | SEQ ID NO: 1791 | UGUGUCGUGCA | SEQ ID NO: 2971 | CAATTACCTG | 0.156 |
| | | ACGACACAUG | | GGUAAUUGUA | | CACGACACA | |
| AH0612 | SEQ ID NO: 612 | AAUUACCUGCA | SEQ ID NO: 1792 | AUGUGUCGUGC | SEQ ID NO: 2972 | AATTACCTGC | 0.257 |
| | | CGACACAUGG | | AGGUAAUUGU | | ACGACACAT | |
| AH0616 | SEQ ID NO: 616 | ACCUGCACGAC | SEQ ID NO: 1796 | UUCCAUGUGUC | SEQ ID NO: 2976 | ACCTGCACGA | 0.292 |
| | | ACAUGGAAAU | | GUGCAGGUAA | | CACATGGAA | |
| AH0617 | SEQ ID NO: 617 | CCUGCACGACA | SEQ ID NO: 1797 | UUUCCAUGUGU | SEQ ID NO: 2977 | CCTGCACGAC | 0.148 |
| | | CAUGGAAAUU | | CGUGCAGGUA | | ACATGGAAA | |
| AH0618 | SEQ ID NO: 618 | CUGCACGACAC | SEQ ID NO: 1798 | AUUUCCAUGUG | SEQ ID NO: 2978 | CTGCACGACA | 0.118 |
| | | AUGGAAAUUG | | UCGUGCAGGU | | CATGGAAAT | |
| AH0622 | SEQ ID NO: 622 | ACGACACAUGG | SEQ ID NO: 1802 | UCCAAUUUCCA | SEQ ID NO: 2982 | ACGACACATG | 0.310 |
| | | AAAUUGGACU | | UGUGUCGUGC | | GAAATTGGA | |
| AH0624 | SEQ ID NO: 624 | GACACAUGGAA | SEQ ID NO: 1804 | AGUCCAAUUUC | SEQ ID NO: 2984 | GACACATGGA | 0.240 |
| | | AUUGGACUAA | | CAUGUGUCGU | | AATTGGACT | |
| AH0625 | SEQ ID NO: 625 | ACACAUGGAAA | SEQ ID NO: 1805 | UAGUCCAAUUU | SEQ ID NO: 2985 | ACACATGGAA | 0.184 |
| | | UUGGACUAAA | | CCAUGUGUCG | | ATTGGACTA | |
| AH0627 | SEQ ID NO: 627 | ACAUGGAAAUU | SEQ ID NO: 1807 | UUUAGUCCAAU | SEQ ID NO: 2987 | ACATGGAAAT | 0.104 |
| | | GGACUAAAUU | | UUCCAUGUGU | | TGGACTAAA | |
| AH0628 | SEQ ID NO: 628 | CAUGGAAAUUG | SEQ ID NO: 1808 | AUUUAGUCCAA | SEQ ID NO: 2988 | CATGGAAATT | 0.163 |
| | | GACUAAAUUA | | UUUCCAUGUG | | GGACTAAAT | |
| AH0629 | SEQ ID NO: 629 | AUGGAAAUUGG | SEQ ID NO: 1809 | AAUUUAGUCCA | SEQ ID NO: 2989 | ATGGAAATTG | 0.298 |
| | | ACUAAAUUAC | | AUUUCCAUGU | | GACTAAATT | |
| AH0630 | SEQ ID NO: 630 | UGGAAAUUGGA | SEQ ID NO: 1810 | UAAUUUAGUCC | SEQ ID NO: 2990 | TGGAAATTGG | 0.215 |
| | | CUAAAUUACC | | AAUUUCCAUG | | ACTAAATTA | |
| AH0631 | SEQ ID NO: 631 | GGAAAUUGGAC | SEQ ID NO: 1811 | GUAAUUUAGUC | SEQ ID NO: 2991 | GGAAATTGGA | 0.307 |
| | | UAAAUUACCA | | CAAUUUCCAU | | CTAAATTAC | |
| AH0633 | SEQ ID NO: 633 | AAAUUGGACUA | SEQ ID NO: 1813 | UGGUAAUUUAG | SEQ ID NO: 2993 | AAATTGGACT | 0.306 |
| | | AAUUACCAGA | | UCCAAUUUCC | | AAATTACCA | |
| AH0638 | SEQ ID NO: 638 | GGACUAAAUUA | SEQ ID NO: 1818 | CAUUCUGGUAA | SEQ ID NO: 2998 | GGACTAAATT | 0.128 |
| | | CCAGAAUGCA | | UUUAGUCCAA | | ACCAGAATG | |
| AH0649 | SEQ ID NO: 649 | CCAGAAUGCAG | SEQ ID NO: 1829 | UUACUUCCCUG | SEQ ID NO: 3009 | CCAGAATGCA | 0.139 |
| | | GGAAGUAAAA | | CAUUCUGGUA | | GGGAAGTAA | |
| AH0650 | SEQ ID NO: 650 | CAGAAUGCAGG | SEQ ID NO: 1830 | UUUACUUCCCU | SEQ ID NO: 3010 | CAGAATGCAG | 0.126 |
| | | GAAGUAAAAU | | GCAUUCUGGU | | GGAAGTAAA | |
| AH0651 | SEQ ID NO: 651 | AGAAUGCAGGG | SEQ ID NO: 1831 | UUUUACUUCCC | SEQ ID NO: 3011 | AGAATGCAGG | 0.117 |
| | | AAGUAAAAUG | | UGCAUUCUGG | | GAAGTAAAA | |
| AH0652 | SEQ ID NO: 652 | GAAUGCAGGGA | SEQ ID NO: 1832 | AUUUUACUUCC | SEQ ID NO: 3012 | GAATGCAGGG | 0.331 |
| | | AGUAAAAUGC | | CUGCAUUCUG | | AAGTAAAAT | |
| AH0653 | SEQ ID NO: 653 | AAUGCAGGGAA | SEQ ID NO: 1833 | CAUUUUACUUC | SEQ ID NO: 3013 | AATGCAGGGA | 0.198 |
| | | GUAAAAUGCC | | CCUGCAUUCU | | AGTAAAATG | |
| AH0657 | SEQ ID NO: 657 | CAGGGAAGUAA | SEQ ID NO: 1837 | UGGGCAUUUUA | SEQ ID NO: 3017 | CAGGGAAGTA | 0.139 |
| | | AAUGCCCAUU | | CUUCCCUGCA | | AAATGCCCA | |
| AH0661 | SEQ ID NO: 661 | GAAGUAAAAUG | SEQ ID NO: 1841 | GGAAUGGGCAU | SEQ ID NO: 3021 | GAAGTAAAAT | 0.321 |
| | | CCCAUUCCCA | | UUUACUUCCC | | GCCCATTCC | |
| AH0664 | SEQ ID NO: 664 | GUAAAAUGCCC | SEQ ID NO: 1844 | AUGGGAAUGGG | SEQ ID NO: 3024 | GTAAAATGCC | 0.091 |
| | | AUUCCCAUCA | | CAUUUUACUU | | CATTCCCAT | |
| AH0669 | SEQ ID NO: 669 | AUGCCCAUUCC | SEQ ID NO: 1849 | UCUUGAUGGGA | SEQ ID NO: 3029 | ATGCCCATTC | 0.249 |
| | | CAUCAAGACC | | AUGGGCAUUU | | CCATCAAGA | |
| AH0670 | SEQ ID NO: 670 | UGCCCAUUCCC | SEQ ID NO: 1850 | GUCUUGAUGGG | SEQ ID NO: 3030 | TGCCCATTCC | 0.160 |
| | | AUCAAGACCA | | AAUGGGCAUU | | CATCAAGAC | |
| AH0672 | SEQ ID NO: 672 | CCCAUUCCCAU | SEQ ID NO: 1852 | UGGUCUUGAUG | SEQ ID NO: 3032 | CCCATTCCCA | 0.097 |
| | | CAAGACCAGA | | GGAAUGGGCA | | TCAAGACCA | |
| AH0673 | SEQ ID NO: 673 | CCAUUCCCAUC | SEQ ID NO: 1853 | CUGGUCUUGAU | SEQ ID NO: 3033 | CCATTCCCAT | 0.137 |
| | | AAGACCAGAC | | GGGAAUGGGC | | CAAGACCAG | |
| AH0674 | SEQ ID NO: 674 | CAUUCCCAUCA | SEQ ID NO: 1854 | UCUGGUCUUGA | SEQ ID NO: 3034 | CATTCCCATC | 0.335 |
| | | AGACCAGACA | | UGGGAAUGGG | | AAGACCAGA | |

TABLE 1-9

| double- | | | | | | | |
|---|---|---|---|---|---|---|---|
| stranded | | | | | | | β2GPI |
| nucleic | | | | antisense strand | | | relative |
| acid | | sense strand sequence | | sequence | | target β2GPI | expression |
| number | SEQ ID NO: | (5′->3′) | SEQ ID NO: | (5′->3′) | SEQ ID NO: | mRNA sequence | level |
| AH0678 | SEQ ID NO: 678 | CCCAUCAAGACCAGACAAUGG | SEQ ID NO: 1858 | AUUGUCUGGUCUUGAUGGGAA | SEQ ID NO: 3038 | CCCATCAAGACCAGACAAT | 0.139 |
| AH0679 | SEQ ID NO: 679 | CCAUCAAGACCAGACAAUGGA | SEQ ID NO: 1859 | CAUUGUCUGGUCUUGAUGGGA | SEQ ID NO: 3039 | CCATCAAGACCAGACAATG | 0.148 |
| AH0680 | SEQ ID NO: 680 | CAUCAAGACCAGACAAUGGAU | SEQ ID NO: 1860 | CCAUUGUCUGGUCUUGAUGGG | SEQ ID NO: 3040 | CATCAAGACCAGACAATGG | 0.286 |
| AH0681 | SEQ ID NO: 681 | AUCAAGACCAGACAAUGGAUU | SEQ ID NO: 1861 | UCCAUUGUCUGGUCUUGAUGG | SEQ ID NO: 3041 | ATCAAGACCAGACAATGGA | 0.159 |
| AH0682 | SEQ ID NO: 682 | UCAAGACCAGACAAUGGAUUU | SEQ ID NO: 1862 | AUCCAUUGUCUGGUCUUGAUG | SEQ ID NO: 3042 | TCAAGACCAGACAATGGAT | 0.218 |
| AH0683 | SEQ ID NO: 683 | AAGACCAGACAAUGGAUUUG | SEQ ID NO: 1863 | AAUCCAUUGUCUGGUCUUGAU | SEQ ID NO: 3043 | CAAGACCAGACAATGGAT1 | 0.096 |
| AH0684 | SEQ ID NO: 684 | AAGACCAGACAAUGGAUUUGU | SEQ ID NO: 1864 | AAAUCCAUUGUCUGGUCUUGA | SEQ ID NO: 3044 | AAGACCAGACAATGGATTT | 0.220 |
| AH0685 | SEQ ID NO: 685 | AGACCAGACAAUGGAUUUGUG | SEQ ID NO: 1865 | CAAAUCCAUUGUCUGGUCUUG | SEQ ID NO: 3045 | AGACCAGACAATGGATTTG | 0.135 |
| AH0687 | SEQ ID NO: 687 | ACCAGACAAUGGAUUUGUGAA | SEQ ID NO: 1867 | CACAAAUCCAUUGUCUGGUCU | SEQ ID NO: 3047 | ACCAGACAATGGATTTGTG | 0.146 |
| AH0688 | SEQ ID NO: 688 | CCAGACAAUGGAUUUGUGAAC | SEQ ID NO: 1868 | UCACAAAUCCAUUGUCUGGUC | SEQ ID NO: 3048 | CCAGACAATGGATTTGTGA | 0.114 |
| AH0689 | SEQ ID NO: 689 | CAGACAAUGGAUUUGUGAACU | SEQ ID NO: 1869 | UUCACAAAUCCAUUGUCUGGU | SEQ ID NO: 3049 | CAGACAATGGATTTGTGAA | 0.067 |
| AH0690 | SEQ ID NO: 690 | AGACAAUGGAUUUGUGAACUA | SEQ ID NO: 1870 | GUUCACAAAUCCAUUGUCUGG | SEQ ID NO: 3050 | AGACAATGGATTTGTGAAC | 0.280 |
| AH0692 | SEQ ID NO: 692 | ACAAUGGAUUUGUGAACUAUC | SEQ ID NO: 1872 | UAGUUCACAAAUCCAUUGUCU | SEQ ID NO: 3052 | ACAATGGATITGTGAACTA | 0.296 |
| AH0693 | SEQ ID NO: 693 | CAAUGGAUUUGUGAACUAUCC | SEQ ID NO: 1873 | AUAGUUCACAAAUCCAUUGUC | SEQ ID NO: 3053 | CAATGGATTTGTGAACTAT | 0.086 |
| AH0694 | SEQ ID NO: 694 | AAUGGAUUUGUGAACUAUCCU | SEQ ID NO: 1874 | GAUAGUUCACAAAUCCAUUGU | SEQ ID NO: 3054 | AATGGATTTGTGAACTATC | 0.267 |
| AH0697 | SEQ ID NO: 697 | GGAUUUGUGAACUAUCCUGCA | SEQ ID NO: 1877 | CAGGAUAGUUCACAAAUCCAU | SEQ ID NO: 3057 | GGATTTGTGAACTATCCTG | 0.196 |
| AH0699 | SEQ ID NO: 699 | AUUUGUGAACUAUCCUGCAAA | SEQ ID NO: 1879 | UGCAGGAUAGUUCACAAAUCC | SEQ ID NO: 3059 | ATTTGTGAACTATCCTGCA | 0.268 |
| AH0700 | SEQ ID NO: 700 | UUUGUGAACUAUCCUGCAAAA | SEQ ID NO: 1880 | UUGCAGGAUAGUUCACAAAUC | SEQ ID NO: 3060 | TTTGTGAACTATCCTGCAA | 0.319 |
| AH0701 | SEQ ID NO: 701 | UUGUGAACUAUCCUGCAAAAC | SEQ ID NO: 1881 | UUUGCAGGAUAGUUCACAAAU | SEQ ID NO: 3061 | TTGTGAACTATCCTGCAAA | 0.112 |
| AH0702 | SEQ ID NO: 702 | UGUGAACUAUCCUGCAAAACC | SEQ ID NO: 1882 | UUUUGCAGGAUAGUUCACAAA | SEQ ID NO: 3062 | TGTGAACTATCCTGCAAAA | 0.231 |
| AH0705 | SEQ ID NO: 705 | GAACUAUCCUGCAAAACCAAC | SEQ ID NO: 1885 | UGGUUUUGCAGGAUAGUUCAC | SEQ ID NO: 3065 | GAACTATCCTGCAAAACCA | 0.057 |
| AH0706 | SEQ ID NO: 706 | AACUAUCCUGCAAAACCAACA | SEQ ID NO: 1886 | UUGGUUUUGCAGGAUAGUUCA | SEQ ID NO: 3066 | AACTATCCTGCAAAACCAA | 0.092 |
| AH0708 | SEQ ID NO: 708 | CUAUCCUGCAAAACCAACACU | SEQ ID NO: 1888 | UGUUGGUUUUGCAGGAUAGUU | SEQ ID NO: 3068 | CTATCCTGCAAAACCAACA | 0.088 |
| AH0709 | SEQ ID NO: 709 | UAUCCUGCAAAACCAACACUU | SEQ ID NO: 1889 | GUGUUGGUUUUGCAGGAUAGU | SEQ ID NO: 3069 | TATCCTGCAAAACCAACAC | 0.340 |
| AH0711 | SEQ ID NO: 711 | UCCUGCAAAACCAACACUUUA | SEQ ID NO: 1891 | AAGUGUUGGUUUUGCAGGAUA | SEQ ID NO: 3071 | TCCTGCAAAACCAACACTT | 0.146 |
| AH0712 | SEQ ID NO: 712 | CCUGCAAAACCAACACUUUAU | SEQ ID NO: 1892 | AAAGUGUUGGUUUUGCAGGAU | SEQ ID NO: 3072 | CCTGCAAAACCAACACTTT | 0.060 |
| AH0713 | SEQ ID NO: 713 | CUGCAAAACCAACACUUUAUU | SEQ ID NO: 1893 | UAAAGUGUUGGUUUUGCAGGA | SEQ ID NO: 3073 | CTGCAAAACCAACACTTTA | 0.059 |
| AH0714 | SEQ ID NO: 714 | UGCAAAACCAACACUUUAUUA | SEQ ID NO: 1894 | AUAAAGUGUUGGUUUUGCAGG | SEQ ID NO: 3074 | TGCAAAACCAACACTTTAT | 0.092 |
| AH0715 | SEQ ID NO: 715 | GCAAAACCAACACUUUAUUAC | SEQ ID NO: 1895 | AAUAAAGUGUUGGUUUUGCAG | SEQ ID NO: 3075 | GCAAAACCAACACTTTATT | 0.183 |
| AH0716 | SEQ ID NO: 716 | CAAAACCAACACUUUAUUACA | SEQ ID NO: 1896 | UAAUAAAGUGUUGGUUUUGCA | SEQ ID NO: 3076 | CAAAACCAACACTTTATTA | 0.189 |
| AH0718 | SEQ ID NO: 718 | AAACCAACACUUUAUUACAAG | SEQ ID NO: 1898 | UGUAAUAAAGUGUUGGUUUUG | SEQ ID NO: 3078 | AAACCAACACTTTATTACA | 0.133 |
| AH0719 | SEQ ID NO: 719 | AACCAACACUUUAUUACAAGG | SEQ ID NO: 1899 | UUGUAAUAAAGUGUUGGUUUU | SEQ ID NO: 3079 | AACCAACACTTTATTACAA | 0.202 |
| AH0721 | SEQ ID NO: 721 | CCAACACUUUAUUACAAGGAU | SEQ ID NO: 1901 | CCUUGUAAUAAAGUGUUGGUU | SEQ ID NO: 3081 | CCAACACTTTATTACAAGG | 0.247 |
| AH0723 | SEQ ID NO: 723 | AACACUUUAUUACAAGGAUAA | SEQ ID NO: 1903 | AUCCUUGUAAUAAAGUGUUGG | SEQ ID NO: 3083 | AACACTTTATTACAAGGAT | 0.174 |
| AH0724 | SEQ ID NO: 724 | ACACUUUAUUACAAGGAUAAA | SEQ ID NO: 1904 | UAUCCUUGUAAUAAAGUGUUG | SEQ ID NO: 3084 | ACACTTTATTACAAGGATA | 0.090 |
| AH0725 | SEQ ID NO: 725 | CACUUUAUUACAAGGAUAAAG | SEQ ID NO: 1905 | UUAUCCUUGUAAUAAAGUGUU | SEQ ID NO: 3085 | CACTTTATTACAAGGATAA | 0.146 |
| AH0735 | SEQ ID NO: 735 | CAAGGAUAAAGCCACAUUUGG | SEQ ID NO: 1915 | AAAUGUGGCUUUAUCCUUGUA | SEQ ID NO: 3095 | CAAGGATAAAGCCACATTT | 0.134 |
| AH0737 | SEQ ID NO: 737 | AGGAUAAAGCCACAUUUGGCU | SEQ ID NO: 1917 | CCAAAUGUGGCUUUAUCCUUG | SEQ ID NO: 3097 | AGGATAAAGCCACATTTGG | 0.321 |
| AH0739 | SEQ ID NO: 739 | GAUAAAGCCACAUUUGGCUGC | SEQ ID NO: 1919 | AGCCAAAUGUGGCUUUAUCCU | SEQ ID NO: 3099 | GATAAAGCCACATTTGGCT | 0.304 |
| AH0743 | SEQ ID NO: 743 | AAGCCACAUUUGGCUGCCAUG | SEQ ID NO: 1923 | UGGCAGCCAAAUGUGGCUUUA | SEQ ID NO: 3103 | AAGCCACATTTGGCTGCCA | 0.216 |
| AH0744 | SEQ ID NO: 744 | AGCCACAUUUGGCUGCCAUGA | SEQ ID NO: 1924 | AUGGCAGCCAAAUGUGGCUUU | SEQ ID NO: 3104 | AGCCACATTTGGCTGCCAT | 0.306 |
| AH0745 | SEQ ID NO: 745 | GCCACAUUUGGCUGCCAUGAU | SEQ ID NO: 1925 | CAUGGCAGCCAAAUGUGGCUU | SEQ ID NO: 3105 | GCCACATTTGGCTGCCATG | 0.112 |
| AH0746 | SEQ ID NO: 746 | CCACAUUUGGCUGCCAUGAUG | SEQ ID NO: 1926 | UCAUGGCAGCCAAAUGUGGCU | SEQ ID NO: 3106 | CCACATTTGGCTGCCATGA | 0.342 |
| AH0747 | SEQ ID NO: 747 | CACAUUUGGCUGCCAUGAUGG | SEQ ID NO: 1927 | AUCAUGGCAGCCAAAUGUGGC | SEQ ID NO: 3107 | CACATTTGGCTGCCATGAT | 0.185 |
| AH0748 | SEQ ID NO: 748 | ACAUUUGGCUGCCAUGAUGGA | SEQ ID NO: 1928 | CAUCAUGGCAGCCAAAUGUGG | SEQ ID NO: 3108 | ACATTTGGCTGCCATGATG | 0.107 |
| AH0749 | SEQ ID NO: 749 | CAUUUGGCUGCCAUGAUGGAU | SEQ ID NO: 1929 | CCAUCAUGGCAGCCAAAUGUG | SEQ ID NO: 3109 | CATTTGGCTGCCATGATGG | 0.214 |

TABLE 1-10

| double- | | | | | | | |
|---|---|---|---|---|---|---|---|
| stranded | | | | | | | β2GPI |
| nucleic | | | | antisense strand | | | relative |
| acid | | sense strand sequence | | sequence | | target β2GPI | expression |
| number | SEQ ID NO: | (5′->3′) | SEQ ID NO: | (5′->3′) | SEQ ID NO: | mRNA sequence | level |
| AH0750 | SEQ ID NO: 750 | AUUUGGCUGCCAUGAUGGAUA | SEQ ID NO: 1930 | UCCAUCAUGGCAGCCAAAUGU | SEQ ID NO: 3110 | ATTTGGCTGCCATGATGGA | 0.128 |
| AH0753 | SEQ ID NO: 753 | UGGCUGCCAUGAUGGAUAUUC | SEQ ID NO: 1933 | AUAUCCAUCAUGGCAGCCAAA | SEQ ID NO: 3113 | TGGCTGCCATGATGGATAT | 0.117 |
| AH0754 | SEQ ID NO: 754 | GGCUGCCAUGAUGGAUAUUCU | SEQ ID NO: 1934 | AAUAUCCAUCAUGGCAGCCAA | SEQ ID NO: 3114 | GGCTGCCATGATGGATATT | 0.162 |
| AH0756 | SEQ ID NO: 756 | CUGCCAUGAUGGAUAUUCUCU | SEQ ID NO: 1936 | AGAAUAUCCAUCAUGGCAGCC | SEQ ID NO: 3116 | CTGCCATGATGGATATTCT | 0.095 |
| AH0757 | SEQ ID NO: 757 | UGCCAUGAUGGAUAUUCUCUG | SEQ ID NO: 1937 | GAGAAUAUCCAUCAUGGCAGC | SEQ ID NO: 3117 | TGCCATGATGGATATTCTC | 0.226 |
| AH0759 | SEQ ID NO: 759 | CCAUGAUGGAUAUUCUCUGGA | SEQ ID NO: 1939 | CAGAGAAUAUCCAUCAUGGCA | SEQ ID NO: 3119 | CCATGATGGATATTCTCTG | 0.283 |
| AH0760 | SEQ ID NO: 760 | CAUGAUGGAUAUUCUCUGGAU | SEQ ID NO: 1940 | CCAGAGAAUAUCCAUCAUGGC | SEQ ID NO: 3120 | CATGATGGATATTCTCTGG | 0.337 |
| AH0762 | SEQ ID NO: 762 | UGAUGGAUAUUCUCUGGAUGG | SEQ ID NO: 1942 | AUCCAGAGAAUAUCCAUCAUG | SEQ ID NO: 3122 | TGATGGATATTCTCTGGAT | 0.195 |
| AH0763 | SEQ ID NO: 763 | GAUGGAUAUUCUCUGGAUGGC | SEQ ID NO: 1943 | CAUCCAGAGAAUAUCCAUCAU | SEQ ID NO: 3123 | GATGGATATTCTCTGGATG | 0.141 |
| AH0766 | SEQ ID NO: 766 | GGAUAUUCUCUGGAUGGCCCG | SEQ ID NO: 1946 | GGCCAUCCAGAGAAUAUCCAU | SEQ ID NO: 3126 | GGATATTCTCTGGATGGCC | 0.199 |
| AH0771 | SEQ ID NO: 771 | UUCUCUGGAUGGCCCGGAAGA | SEQ ID NO: 1951 | UUCCGGGCCAUCCAGAGAAUA | SEQ ID NO: 3131 | TTCTCTGGATGGCCCGGAA | 0.267 |
| AH0773 | SEQ ID NO: 773 | CUCUGGAUGGCCCGGAAGAAA | SEQ ID NO: 1953 | UCUUCCGGGCCAUCCAGAGAA | SEQ ID NO: 3133 | CTCTGGATGGCCCGGAAGA | 0.167 |
| AH0774 | SEQ ID NO: 774 | UCUGGAUGGCCCGGAAGAAAU | SEQ ID NO: 1954 | UUCUUCCGGGCCAUCCAGAGA | SEQ ID NO: 3134 | TCTGGATGGCCCGGAAGAA | 0.207 |
| AH0775 | SEQ ID NO: 775 | CUGGAUGGCCCGGAAGAAAUA | SEQ ID NO: 1955 | UUUCUUCCGGGCCAUCCAGAG | SEQ ID NO: 3135 | CTGGATGGCCCGGAAGAAA | 0.310 |
| AH0776 | SEQ ID NO: 776 | UGGAUGGCCCGGAAGAAAUAG | SEQ ID NO: 1956 | AUUUCUUCCGGGCCAUCCAGA | SEQ ID NO: 3136 | TGGATGGCCCGGAAGAAAT | 0.134 |
| AH0777 | SEQ ID NO: 777 | GGAUGGCCCGGAAGAAAUAGA | SEQ ID NO: 1957 | UAUUUCUUCCGGGCCAUCCAG | SEQ ID NO: 3137 | GGATGGCCCGGAAGAAATA | 0.070 |
| AH0779 | SEQ ID NO: 779 | AUGGCCCGGAAGAAAUAGAAU | SEQ ID NO: 1959 | UCUAUUUCUUCCGGGCCAUCC | SEQ ID NO: 3139 | ATGGCCCGGAAGAAATAGA | 0.201 |
| AH0780 | SEQ ID NO: 780 | UGGCCCGGAAGAAAUAGAAUG | SEQ ID NO: 1960 | UUCUAUUUCUUCCGGGCCAUC | SEQ ID NO: 3140 | TGGCCCGGAAGAAATAGAA | 0.160 |
| AH0781 | SEQ ID NO: 781 | GGCCCGGAAGAAAUAGAAUGU | SEQ ID NO: 1961 | AUUCUAUUUCUUCCGGGCCAU | SEQ ID NO: 3141 | GGCCCGGAAGAAATAGAAT | 0.205 |
| AH0782 | SEQ ID NO: 782 | GCCCGGAAGAAAUAGAAUGUA | SEQ ID NO: 1962 | CAUUCUAUUUCUUCCGGGCCA | SEQ ID NO: 3142 | GCCCGGAAGAAATAGAATG | 0.066 |
| AH0783 | SEQ ID NO: 783 | CCCGGAAGAAAUAGAAUGUAC | SEQ ID NO: 1963 | ACAUUCUAUUUCUUCCGGGCC | SEQ ID NO: 3143 | CCCGGAAGAAATAGAATGT | 0.153 |
| AH0785 | SEQ ID NO: 785 | CGGAAGAAAUAGAAUGUACCA | SEQ ID NO: 1965 | GUACAUUCUAUUUCUUCCGGG | SEQ ID NO: 3145 | CGGAAGAAATAGAATGTAC | 0.126 |
| AH0786 | SEQ ID NO: 786 | GGAAGAAAUAGAAUGUACCAA | SEQ ID NO: 1966 | GGUACAUUCUAUUUCUUCCGG | SEQ ID NO: 3146 | GGAAGAAATAGAATGTACC | 0.295 |
| AH0787 | SEQ ID NO: 787 | GAAGAAAUAGAAUGUACCAAA | SEQ ID NO: 1967 | UGGUACAUUCUAUUUCUUCCG | SEQ ID NO: 3147 | GAAGAAATAGAATGTACCA | 0.244 |
| AH0790 | SEQ ID NO: 790 | GAAAUAGAAUGUACCAAACUG | SEQ ID NO: 1970 | GUUUGGUACAUUCUAUUUCUU | SEQ ID NO: 3150 | GAAATAGAATGTACCAAAC | 0.196 |
| AH0795 | SEQ ID NO: 795 | AGAAUGUACCAAACUGGGAAA | SEQ ID NO: 1975 | UCCCAGUUUGGUACAUUCUAU | SEQ ID NO: 3155 | AGAATGTACCAAACTGGGA | 0.172 |
| AH0796 | SEQ ID NO: 796 | GAAUGUACCAAACUGGGAAAC | SEQ ID NO: 1976 | UUCCCAGUUUGGUACAUUCUA | SEQ ID NO: 3156 | GAATGTACCAAACTGGGAA | 0.082 |
| AH0797 | SEQ ID NO: 797 | AAUGUACCAAACUGGGAAACU | SEQ ID NO: 1977 | UUUCCCAGUUUGGUACAUUCU | SEQ ID NO: 3157 | AATGTACCAAACTGGGAAA | 0.310 |
| AH0800 | SEQ ID NO: 800 | GUACCAAACUGGGAAACUGGU | SEQ ID NO: 1980 | CAGUUUCCCAGUUUGGUACAU | SEQ ID NO: 3160 | GTACCAAACTGGGAAACTG | 0.173 |
| AH0804 | SEQ ID NO: 804 | CAAACUGGGAAACUGGUCUGC | SEQ ID NO: 1984 | AGACCAGUUUCCCAGUUUGGU | SEQ ID NO: 3164 | CAAACTGGGAAACTGGTCT | 0.115 |
| AH0805 | SEQ ID NO: 805 | AAACUGGGAAACUGGUCUGCC | SEQ ID NO: 1985 | CAGACCAGUUUCCCAGUUUGG | SEQ ID NO: 3165 | AAACTGGGAAACTGGTCTG | 0.174 |
| AH0808 | SEQ ID NO: 808 | CUGGGAAACUGGUCUGCCAUG | SEQ ID NO: 1988 | UGGCAGACCAGUUUCCCAGUU | SEQ ID NO: 3168 | CTGGGAAACTGGTCTGCCA | 0.025 |
| AH0809 | SEQ ID NO: 809 | UGGGAAACUGGUCUGCCAUGC | SEQ ID NO: 1989 | AUGGCAGACCAGUUUCCCAGU | SEQ ID NO: 3169 | TGGGAAACTGGTCTGCCAT | 0.143 |
| AH0810 | SEQ ID NO: 810 | GGGAAACUGGUCUGCCAUGCC | SEQ ID NO: 1990 | CAUGGCAGACCAGUUUCCCAG | SEQ ID NO: 3170 | GGGAAACTGGTCTGCCATG | 0.331 |
| AH0811 | SEQ ID NO: 811 | GGAAACUGGUCUGCCAUGCCA | SEQ ID NO: 1991 | GCAUGGCAGACCAGUUUCCCA | SEQ ID NO: 3171 | GGAAACTGGTCTGCCATGC | 0.326 |
| AH0813 | SEQ ID NO: 813 | AAACUGGUCUGCCAUGCCAAG | SEQ ID NO: 1993 | UGGCAUGGCAGACCAGUUUCC | SEQ ID NO: 3173 | AAACTGGTCTGCCATGCCA | 0.125 |
| AH0814 | SEQ ID NO: 814 | AACUGGUCUGCCAUGCCAAGU | SEQ ID NO: 1994 | UUGGCAUGGCAGACCAGUUUC | SEQ ID NO: 3174 | AACTGGTCTGCCATGCCAA | 0.127 |
| AH0815 | SEQ ID NO: 815 | ACUGGUCUGCCAUGCCAAGUU | SEQ ID NO: 1995 | CUUGGCAUGGCAGACCAGUUU | SEQ ID NO: 3175 | ACTGGTCTGCCATGCCAAG | 0.280 |
| AH0816 | SEQ ID NO: 816 | CUGGUCUGCCAUGCCAAGUUG | SEQ ID NO: 1996 | ACUUGGCAUGGCAGACCAGUU | SEQ ID NO: 3176 | CTGGTCTGCCATGCCAAGT | 0.323 |
| AH0817 | SEQ ID NO: 817 | UGGUCUGCCAUGCCAAGUUGU | SEQ ID NO: 1997 | AACUUGGCAUGGCAGACCAGU | SEQ ID NO: 3177 | TGGTCTGCCATGCCAAGTT | 0.167 |
| AH0818 | SEQ ID NO: 818 | GGUCUGCCAUGCCAAGUUGUA | SEQ ID NO: 1998 | CAACUUGGCAUGGCAGACCAG | SEQ ID NO: 3178 | GGICTGCCATGCCAAGTTG | 0.156 |
| AH0819 | SEQ ID NO: 819 | GUCUGCCAUGCCAAGUUGUAA | SEQ ID NO: 1999 | ACAACUUGGCAUGGCAGACCA | SEQ ID NO: 3179 | GTCTGCCATGCCAAGTTGT | 0.118 |
| AH0820 | SEQ ID NO: 820 | UCUGCCAUGCCAAGUUGUAAA | SEQ ID NO: 2000 | UACAACUUGGCAUGGCAGACC | SEQ ID NO: 3180 | TCTGCCATGCCAAGTTGTA | 0.072 |
| AH0821 | SEQ ID NO: 821 | CUGCCAUGCCAAGUUGUAAAG | SEQ ID NO: 2001 | UUACAACUUGGCAUGGCAGAC | SEQ ID NO: 3181 | CTGCCATGCCAAGTTGTAA | 0.066 |
| AH0822 | SEQ ID NO: 822 | UGCCAUGCCAAGUUGUAAAGC | SEQ ID NO: 2002 | UUUACAACUUGGCAUGGCAGA | SEQ ID NO: 3182 | TGCCATGCCAAGTTGTAAA | 0.090 |
| AH0823 | SEQ ID NO: 823 | GCCAUGCCAAGUUGUAAAGCA | SEQ ID NO: 2003 | CUUUACAACUUGGCAUGGCAG | SEQ ID NO: 3183 | GCCATGCCAAGTTGTAAAG | 0.128 |

TABLE 1-11

| double- | | | | | | | β2GPI |
|---|---|---|---|---|---|---|---|
| stranded | | | | antisense strand | | | relative |
| nucleic acid | | sense strand sequence | | sequence | | target β2GPI | expression |
| number | SEQ ID NO | (5′->3′) | SEQ ID NO | (5′->3) | SEQ ID NO: | mRNA sequence | level |
| AH0825 | SEQ ID NO: 825 | CAUGCCAAGUUGUAAAGCAUC | SEQ ID NO: 2005 | UGCUUUACAACUUGGCAUGGC | SEQ ID NO: 3185 | CATGCCAAGTTGTAAAGCA | 0.086 |
| AH0826 | SEQ ID NO: 826 | AUGCCAAGUUGUAAAGCAUCU | SEQ ID NO: 2006 | AUGCUUUACAACUUGGCAUGG | SEQ ID NO: 3186 | ATGCCAAGTTGTAAAGCAT | 0.082 |
| AH0827 | SEQ ID NO: 827 | UGCCAAGUUGUAAAGCAUCUU | SEQ ID NO: 2007 | GAUGCUUUACAACUUGGCAUG | SEQ ID NO: 3187 | TGCCAAGTTGTAAAGCATC | 0.342 |
| AH0828 | SEQ ID NO: 828 | GCCAAGUUGUAAAGCAUCUUG | SEQ ID NO: 2008 | AGAUGCUUUACAACUUGGCAU | SEQ ID NO: 3188 | GCCAAGTTGTAAAGCATCT | 0.160 |
| AH0829 | SEQ ID NO: 829 | CCAAGUUGUAAAGCAUCUUGU | SEQ ID NO: 2009 | AAGAUGCUUUACAACUUGGCA | SEQ ID NO: 3189 | CCAAGTTGTAAAGCATCTT | 0.159 |
| AH0830 | SEQ ID NO: 830 | CAAGUUGUAAAGCAUCUUGUA | SEQ ID NO: 2010 | CAAGAUGCUUUACAACUUGGC | SEQ ID NO: 3190 | CAAGTTGTAAAGCATCTTG | 0.134 |
| AH0831 | SEQ ID NO: 831 | AAGUUGUAAAGCAUCUUGUAA | SEQ ID NO: 2011 | ACAAGAUGCUUUACAACUUGG | SEQ ID NO: 3191 | AAGTTGTAAAGCATCTTGT | 0.110 |
| AH0832 | SEQ ID NO: 832 | AGUUGUAAAGCAUCUUGUAAA | SEQ ID NO: 2012 | UACAAGAUGCUUUACAACUUG | SEQ ID NO: 3192 | AGTTGTAAAGCATCTTGTA | 0.064 |
| AH0833 | SEQ ID NO: 833 | GUUGUAAAGCAUCUUGUAAAG | SEQ ID NO: 2013 | UUACAAGAUGCUUUACAACUU | SEQ ID NO: 3193 | GTTGTAAAGCATCTTGTAA | 0.175 |
| AH0834 | SEQ ID NO: 834 | UUGUAAAGCAUCUUGUAAAGU | SEQ ID NO: 2014 | UUUACAAGAUGCUUUACAACU | SEQ ID NO: 3194 | TTGTAAAGCATCTTGTAAA | 0.092 |
| AH0835 | SEQ ID NO: 835 | UGUAAAGCAUCUUGUAAAGUA | SEQ ID NO: 2015 | CUUUACAAGAUGCUUUACAAC | SEQ ID NO: 3195 | TGTAAAGCATCTTGTAAAG | 0.129 |
| AH0837 | SEQ ID NO: 837 | UAAAGCAUCUUGUAAAGUACC | SEQ ID NO: 2017 | UACUUUACAAGAUGCUUUACA | SEQ ID NO: 3197 | TAAAGCATCTTGTAAAGTA | 0.087 |
| AH0838 | SEQ ID NO: 838 | AAAGCAUCUUGUAAAGUACCU | SEQ ID NO: 2018 | GUACUUUACAAGAUGCUUUAC | SEQ ID NO: 3198 | AAAGCATCTTGTAAAGTAC | 0.174 |
| AH0840 | SEQ ID NO: 840 | AGCAUCUUGUAAAGUACCUGU | SEQ ID NO: 2020 | AGGUACUUUACAAGAUGCUUU | SEQ ID NO: 3200 | AGCATCTTGTAAAGTACCT | 0.326 |
| AH0842 | SEQ ID NO: 842 | CAUCUUGUAAAGUACCUGUGA | SEQ ID NO: 2022 | ACAGGUACUUUACAAGAUGCU | SEQ ID NO: 3202 | CATCTTGTAAAGTACCTGT | 0.260 |
| AH0845 | SEQ ID NO: 845 | CUUGUAAAGUACCUGUGAAAA | SEQ ID NO: 2025 | UUCACAGGUACUUUACAAGAU | SEQ ID NO: 3205 | CTTGTAAAGTACCTGTGAA | 0.187 |
| AH0846 | SEQ ID NO: 846 | UUGUAAAGUACCUGUGAAAAA | SEQ ID NO: 2026 | UUUCACAGGUACUUUACAAGA | SEQ ID NO: 3206 | TTGTAAAGTACCTGTGAAA | 0.166 |
| AH0847 | SEQ ID NO: 847 | UGUAAAGUACCUGUGAAAAAA | SEQ ID NO: 2027 | UUUUCACAGGUACUUUACAAG | SEQ ID NO: 3207 | TGTAAAGTACCTGTGAAAA | 0.210 |
| AH0852 | SEQ ID NO: 852 | AGUACCUGUGAAAAAAGCCAC | SEQ ID NO: 2032 | GGCUUUUUUCACAGGUACUUU | SEQ ID NO: 3212 | AGTACCTGTGAAAAAAGCC | 0.247 |
| AH0853 | SEQ ID NO: 853 | GUACCUGUGAAAAAAGCCACU | SEQ ID NO: 2033 | UGGCUUUUUUCACAGGUACUU | SEQ ID NO: 3213 | GTACCTGTGAAAAAAGCCA | 0.334 |
| AH0854 | SEQ ID NO: 854 | UACCUGUGAAAAAAGCCACUG | SEQ ID NO: 2034 | GUGGCUUUUUUCACAGGUACU | SEQ ID NO: 3214 | TACCTGTGAAAAAAGCCAC | 0.302 |
| AH0855 | SEQ ID NO: 855 | ACCUGUGAAAAAAGCCACUGU | SEQ ID NO: 2035 | AGUGGCUUUUUUCACAGGUAC | SEQ ID NO: 3215 | ACCTGTGAAAAAAGCCACT | 0.312 |
| AH0857 | SEQ ID NO: 857 | CUGUGAAAAAAGCCACUGUGG | SEQ ID NO: 2037 | ACAGUGGCUUUUUUCACAGGU | SEQ ID NO: 3217 | CTGTGAAAAAAGCCACTGT | 0.196 |
| AH0858 | SEQ ID NO: 858 | UGUGAAAAAAGCCACUGUGGU | SEQ ID NO: 2038 | CACAGUGGCUUUUUUCACAGG | SEQ ID NO: 3218 | TGTGAAAAAAGCCACTGTG | 0.091 |
| AH0859 | SEQ ID NO: 859 | GUGAAAAAAGCCACUGUGGUG | SEQ ID NO: 2039 | CCACAGUGGCUUUUUUCACAG | SEQ ID NO: 3219 | GTGAAAAAAGCCACTGTGG | 0.287 |
| AH0860 | SEQ ID NO: 860 | UGAAAAAAGCCACUGUGGUGU | SEQ ID NO: 2040 | ACCACAGUGGCUUUUUUCACA | SEQ ID NO: 3220 | TGAAAAAAGCCACTGTGGT | 0.278 |
| AH0861 | SEQ ID NO: 861 | GAAAAAAGCCACUGUGGUGUA | SEQ ID NO: 2041 | CACCACAGUGGCUUUUUUCAC | SEQ ID NO: 3221 | GAAAAAAGCCACTGTGGTG | 0.170 |
| AH0863 | SEQ ID NO: 863 | AAAAAGCCACUGUGGUGUACC | SEQ ID NO: 2043 | UACACCACAGUGGCUUUUUUC | SEQ ID NO: 3223 | AAAAAGCCACTGTGGTGTA | 0.269 |
| AH0864 | SEQ ID NO: 864 | AAAAGCCACUGUGGUGUACCA | SEQ ID NO: 2044 | GUACACCACAGUGGCUUUUUU | SEQ ID NO: 3224 | AAAAGCCACTGTGGTGTAC | 0.185 |
| AH0866 | SEQ ID NO: 866 | AAGCCACUGUGGUGUACCAAG | SEQ ID NO: 2046 | UGGUACACCACAGUGGCUUUU | SEQ ID NO: 3226 | AAGCCACTGTGGTGTACCA | 0.209 |
| AH0867 | SEQ ID NO: 867 | AGCCACUGUGGUGUACCAAGG | SEQ ID NO: 2047 | UUGGUACACCACAGUGGCUUU | SEQ ID NO: 3227 | AGCCACTGTGGTGTACCAA | 0.235 |
| AH0868 | SEQ ID NO: 868 | GCCACUGUGGUGUACCAAGGA | SEQ ID NO: 2048 | CUUGGUACACCACAGUGGCUU | SEQ ID NO: 3228 | GCCACTGTGGTGTACCAAG | 0.106 |
| AH0870 | SEQ ID NO: 870 | CACUGUGGUGUACCAAGGAGA | SEQ ID NO: 2050 | UCCUUGGUACACCACAGUGGC | SEQ ID NO: 3230 | CACTGTGGTGTACCAAGGA | 0.154 |
| AH0872 | SEQ ID NO: 872 | CUGUGGUGUACCAAGGAGAGA | SEQ ID NO: 2052 | UCUCCUUGGUACACCACAGUG | SEQ ID NO: 3232 | CTGTGGTGTACCAAGGAGA | 0.230 |
| AH0873 | SEQ ID NO: 873 | UGUGGUGUACCAAGGAGAGAG | SEQ ID NO: 2053 | CUCUCCUUGGUACACCACAGU | SEQ ID NO: 3233 | TGTGGTGTACCAAGGAGAG | 0.289 |
| AH0874 | SEQ ID NO: 874 | GUGGUGUACCAAGGAGAGAGA | SEQ ID NO: 2054 | UCUCUCCUUGGUACACCACAG | SEQ ID NO: 3234 | GTGGTGTACCAAGGAGAGA | 0.174 |
| AH0875 | SEQ ID NO: 875 | UGGUGUACCAAGGAGAGAGAG | SEQ ID NO: 2055 | CUCUCUCCUUGGUACACCACA | SEQ ID NO: 3235 | TGGTGTACCAAGGAGAGAG | 0.281 |
| AH0876 | SEQ ID NO: 876 | GGUGUACCAAGGAGAGAGAGU | SEQ ID NO: 2056 | UCUCUCUCCUUGGUACACCAC | SEQ ID NO: 3236 | GGTGTACCAAGGAGAGAGA | 0.117 |
| AH0877 | SEQ ID NO: 877 | GUGUACCAAGGAGAGAGAGUA | SEQ ID NO: 2057 | CUCUCUCUCCUUGGUACACCA | SEQ ID NO: 3237 | GTGTACCAAGGAGAGAGAG | 0.149 |
| AH0879 | SEQ ID NO: 879 | GUACCAAGGAGAGAGAGUAAA | SEQ ID NO: 2059 | UACUCUCUCUCCUUGGUACAC | SEQ ID NO: 3239 | GTACCAAGGAGAGAGAGTA | 0.325 |
| AH0880 | SEQ ID NO: 880 | UACCAAGGAGAGAGAGUAAAG | SEQ ID NO: 2060 | UUACUCUCUCUCCUUGGUACA | SEQ ID NO: 3240 | TACCAAGGAGAGAGAGTAA | 0.198 |
| AH0881 | SEQ ID NO: 881 | ACCAAGGAGAGAGAGUAAAGA | SEQ ID NO: 2061 | UUUACUCUCUCUCCUUGGUAC | SEQ ID NO: 3241 | ACCAAGGAGAGAGAGTAAA | 0.159 |
| AH0882 | SEQ ID NO: 882 | CCAAGGAGAGAGAGUAAAGAU | SEQ ID NO: 2062 | CUUUACUCUCUCUCCUUGGUA | SEQ ID NO: 3242 | CCAAGGAGAGAGAGTAAAG | 0.244 |
| AH0883 | SEQ ID NO: 883 | CAAGGAGAGAGAGUAAAGAUU | SEQ ID NO: 2063 | UCUUUACUCUCUCUCCUUGGU | SEQ ID NO: 3243 | CAAGGAGAGAGAGTAAAGA | 0.046 |
| AH0884 | SEQ ID NO: 884 | AAGGAGAGAGAGUAAAGAUUC | SEQ ID NO: 2064 | AUCUUUACUCUCUCUCCUUGG | SEQ ID NO: 3244 | AAGGAGAGAGAGTAAAGAT | 0.118 |
| AH0885 | SEQ ID NO: 885 | AGGAGAGAGAGUAAAGAUUCA | SEQ ID NO: 2065 | AAUCUUUACUCUCUCUCCUUG | SEQ ID NO: 3245 | AGGAGAGAGAGTAAAGATT | 0.150 |

TABLE 1-12

| double- | | | | | | | |
|---|---|---|---|---|---|---|---|
| stranded | | | | | | | β2GPI |
| nuclei. | | | | antisense stand | | | relative |
| acid | | sense strand sequence | | sequence | | target β2GPI | expression |
| number | SEQ ID NO: | (5′->3′) | SEQ ID NO: | (5′->3′) | SEQ ID NO: | mRNA sequence | level |
| AH0886 | SEQ ID NO: 886 | GGAGAGAGAGUAAAGAUUCAG | SEQ ID NO: 2066 | GAAUCUUUACUCUCUCUCCUU | SEQ ID NO: 3246 | GGAGAGAGAGTAAAGATTC | 0.187 |
| AH0887 | SEQ ID NO: 887 | GAGAGAGAGUAAAGAUUCAGG | SEQ ID NO: 2067 | UGAAUCUUUACUCUCUCUCCU | SEQ ID NO: 3247 | GAGAGAGAGTAAAGATTCA | 0.061 |
| AH0888 | SEQ ID NO: 888 | AGAGAGAGUAAAGAUUCAGGA | SEQ ID NO: 2068 | CUGAAUCUUUACUCUCUCUCC | SEQ ID NO: 3248 | AGAGAGAGTAAAGATTCAG | 0.230 |
| AH0890 | SEQ ID NO: 890 | AGAGAGUAAAGAUUCAGGAAA | SEQ ID NO: 2070 | UCCUGAAUCUUUACUCUCUCU | SEQ ID NO: 3250 | AGAGAGTAAAGATTCAGGA | 0.270 |
| AH0891 | SEQ ID NO: 891 | GAGAGUAAAGAUUCAGGAAAA | SEQ ID NO: 2071 | UUCCUGAAUCUUUACUCUCUC | SEQ ID NO: 3251 | GAGAGTAAAGATTCAGGAA | 0.190 |
| AH0892 | SEQ ID NO: 892 | AGAGUAAAGAUUCAGGAAAAA | SEQ ID NO: 2072 | UUUCCUGAAUCUUUACUCUCU | SEQ ID NO: 3252 | AGAGTAAAGATTCAGGAAA | 0.212 |
| AH0893 | SEQ ID NO: 893 | GAGUAAAGAUUCAGGAAAAAU | SEQ ID NO: 2073 | UUUUCCUGAAUCUUUACUCUC | SEQ ID NO: 3253 | GAGTAAAGATTCAGGAAAA | 0.114 |
| AH0894 | SEQ ID NO: 894 | AGUAAAGAUUCAGGAAAAAUU | SEQ ID NO: 2074 | UUUUUCCUGAAUCUUUACUCU | SEQ ID NO: 3254 | AGTAAAGATTCAGGAAAAA | 0.185 |
| AH0895 | SEQ ID NO: 895 | GUAAAGAUUCAGGAAAAAUUU | SEQ ID NO: 2075 | AUUUUUCCUGAAUCUUUACUC | SEQ ID NO: 3255 | GTAAAGATTCAGGAAAAAT | 0.203 |
| AH0896 | SEQ ID NO: 896 | UAAAGAUUCAGGAAAAAUUUA | SEQ ID NO: 2076 | AAUUUUUCCUGAAUCUUUACU | SEQ ID NO: 3256 | TAAAGATTCAGGAAAAATT | 0.149 |
| AH0897 | SEQ ID NO: 897 | AAAGAUUCAGGAAAAAUUUAA | SEQ ID NO: 2077 | AAAUUUUUCCUGAAUCUUUAC | SEQ ID NO: 3257 | AAAGATTCAGGAAAAATTT | 0.218 |
| AH0898 | SEQ ID NO: 898 | AAGAUUCAGGAAAAAUUUAAG | SEQ ID NO: 2078 | UAAAUUUUUCCUGAAUCUUUA | SEQ ID NO: 3258 | AAGATTCAGGAAAAATTTA | 0.262 |
| AH0899 | SEQ ID NO: 899 | AGAUUCAGGAAAAAUUUAAGA | SEQ ID NO: 2079 | UUAAAUUUUUCCUGAAUCUUU | SEQ ID NO: 3259 | AGATTCAGGAAAAATTTAA | 0.334 |
| AH0905 | SEQ ID NO: 905 | AGGAAAAAUUUAAGAAUGGAA | SEQ ID NO: 2085 | CCAUUCUUAAAUUUUUCCUGA | SEQ ID NO: 3265 | AGGAAAAATTTAAGAATGG | 0.172 |
| AH0906 | SEQ ID NO: 906 | GGAAAAAUUUAAGAAUGGAAU | SEQ ID NO: 2086 | UCCAUUCUUAAAUUUUUCCUG | SEQ ID NO: 3266 | GGAAAAATTTAAGAATGGA | 0.171 |
| AH0907 | SEQ ID NO: 907 | GAAAAAUUUAAGAAUGGAAUG | SEQ ID NO: 2087 | UUCCAUUCUUAAAUUUUUCCU | SEQ ID NO: 3267 | GAAAAATTTAAGAATGGAA | 0.260 |
| AH0912 | SEQ ID NO: 912 | AUUUAAGAAUGGAAUGCUACA | SEQ ID NO: 2092 | UAGCAUUCCAUUCUUAAAUUU | SEQ ID NO: 3272 | ATTTAAGAATGGAATGCTA | 0.323 |
| AH0914 | SEQ ID NO: 914 | UUAAGAAUGGAAUGCUACAUG | SEQ ID NO: 2094 | UGUAGCAUUCCAUUCUUAAAU | SEQ ID NO: 3274 | TTAAGAATGGAATGCTACA | 0.342 |
| AH0917 | SEQ ID NO: 917 | AGAAUGGAAUGCUACAUGGUG | SEQ ID NO: 2097 | CCAUGUAGCAUUCCAUUCUUA | SEQ ID NO: 3277 | AGAATGGAATGCTACATGG | 0.221 |
| AH0918 | SEQ ID NO: 918 | GAAUGGAAUGCUACAUGGUGA | SEQ ID NO: 2098 | ACCAUGUAGCAUUCCAUUCUU | SEQ ID NO: 3278 | GAATGGAATGCTACATGGT | 0.162 |
| AH0919 | SEQ ID NO: 919 | AAUGGAAUGCUACAUGGUGAU | SEQ ID NO: 2099 | CACCAUGUAGCAUUCCAUUCU | SEQ ID NO: 3279 | AATGGAATGCTACATGGTG | 0.287 |
| AH0920 | SEQ ID NO: 920 | AUGGAAUGCUACAUGGUGAUA | SEQ ID NO: 2100 | UCACCAUGUAGCAUUCCAUUC | SEQ ID NO: 3280 | ATGGAATGCTACATGGTGA | 0212 |
| AH0921 | SEQ ID NO: 921 | UGGAAUGCUACAUGGUGAUAA | SEQ ID NO: 2101 | AUCACCAUGUAGCAUUCCAUU | SEQ ID NO: 3281 | TGGAATGCTACATGGTGAT | 0.127 |
| AH0922 | SEQ ID NO: 922 | GGAAUGCUACAUGGUGAUAAA | SEQ ID NO: 2102 | UAUCACCAUGUAGCAUUCCAU | SEQ ID NO: 3282 | GGAATGCTACATGGTGATA | 0241 |
| AH0923 | SEQ ID NO: 923 | GAAUGCUACAUGGUGAUAAAG | SEQ ID NO: 2103 | UUAUCACCAUGUAGCAUUCCA | SEQ ID NO: 3283 | GAATGCTACATGGTGATAA | 0.343 |
| AH0924 | SEQ ID NO: 924 | AAUGCUACAUGGUGAUAAAGU | SEQ ID NO: 2104 | UUUAUCACCAUGUAGCAUUCC | SEQ ID NO: 3284 | AATGCTACATGGTGATAAA | 0.269 |
| AH0926 | SEQ ID NO: 926 | UGCUACAUGGUGAUAAAGUUU | SEQ ID NO: 2106 | ACUUUAUCACCAUGUAGCAUU | SEQ ID NO: 3286 | TGCTACATGGTGATAAAGT | 0.259 |
| AH0927 | SEQ ID NO: 927 | GCUACAUGGUGAUAAAGUUUC | SEQ ID NO: 2107 | AACUUUAUCACCAUGUAGCAU | SEQ ID NO: 3287 | GCTACATGGTGATAAAGTT | 0.240 |
| AH0928 | SEQ ID NO: 928 | CUACAUGGUGAUAAAGUUUCU | SEQ ID NO: 2108 | AAACUUUAUCACCAUGUAGCA | SEQ ID NO: 3288 | CTACATGGTGATAAAGTTT | 0.080 |
| AH0930 | SEQ ID NO: 930 | ACAUGGUGAUAAAGUUUCUUU | SEQ ID NO: 2110 | AGAAACUUUAUCACCAUGUAG | SEQ ID NO: 3290 | ACATGGTGATAAAGTTTCT | 0.119 |
| AH0932 | SEQ ID NO: 932 | AUGGUGAUAAAGUUUCUUUCU | SEQ ID NO: 2112 | AAAGAAACUUUAUCACCAUGU | SEQ ID NO: 3292 | ATGGTGATAAAGTTTCTTT | 0.342 |
| AH0934 | SEQ ID NO: 934 | GGUGAUAAAGUUUCUUUCUUC | SEQ ID NO: 2114 | AGAAAGAAACUUUAUCACCAU | SEQ ID NO: 3294 | GGTGATAAAGTTTCTITCT | 0.145 |
| AH0935 | SEQ ID NO: 935 | GUGAUAAAGUUUCUUUCUUCU | SEQ ID NO: 2115 | AAGAAAGAAACUUUAUCACCA | SEQ ID NO: 3295 | GTGATAAAGTTTCTTICTT | 0.185 |
| AH0936 | SEQ ID NO: 936 | UGAUAAAGUUUCUUUCUUCUG | SEQ ID NO: 2116 | GAAGAAAGAAACUUUAUCACC | SEQ ID NO: 3296 | TGATAAAGTTTCTITCTIC | 0.132 |
| AH0937 | SEQ ID NO: 937 | GAUAAAGUUUCUUUCUUCUGC | SEQ ID NO: 2117 | AGAAGAAAGAAACUUUAUCAC | SEQ ID NO: 3297 | GATAAAGTTTCTITCTTCT | 0.145 |
| AH0940 | SEQ ID NO: 940 | AAAGUUUCUUUCUUCUGCAAA | SEQ ID NO: 2120 | UGCAGAAGAAAGAAACUUUAU | SEQ ID NO: 3300 | AAAGTTTCTTTCTTCTGCA | 0213 |
| AH0941 | SEQ ID NO: 941 | AAGUUUCUUUCUUCUGCAAAA | SEQ ID NO: 2121 | UUGCAGAAGAAAGAAACUUUA | SEQ ID NO: 3301 | AAGTTTCTITCTTCTGCAA | 0.162 |
| AH0942 | SEQ ID NO: 942 | AGUUUCUUUCUUCUGCAAAAA | SEQ ID NO: 2122 | UUUGCAGAAGAAAGAAACUUU | SEQ ID NO: 3302 | AGTTICTTICTICTGCAAA | 0.229 |
| AH0943 | SEQ ID NO: 943 | GUUUCUUUCUUCUGCAAAAAU | SEQ ID NO: 2123 | UUUUGCAGAAGAAAGAAACUU | SEQ ID NO: 3303 | GTTICTITCTICTGCAAAA | 0.081 |
| AH0944 | SEQ ID NO: 944 | UUUCUUUCUUCUGCAAAAAUA | SEQ ID NO: 2124 | UUUUUGCAGAAGAAAGAAACU | SEQ ID NO: 3304 | TTICTITCTTCTGCAAAAA | 0.119 |
| AH0945 | SEQ ID NO: 945 | UUCUUUCUUCUGCAAAAAUAA | SEQ ID NO: 2125 | AUUUUUGCAGAAGAAAGAAAC | SEQ ID NO: 3305 | TICTTICTICTGCAAAAAT | 0.168 |
| AH0946 | SEQ ID NO: 946 | UCUUUCUUCUGCAAAAAUAAG | SEQ ID NO: 2126 | UAUUUUUGCAGAAGAAAGAAA | SEQ ID NO: 3306 | TCTTTCTTCTGCAAAAATA | 0.106 |
| AH0947 | SEQ ID NO: 947 | CUUUCUUCUGCAAAAAUAAGG | SEQ ID NO: 2127 | UUAUUUUUGCAGAAGAAAGAA | SEQ ID NO: 3307 | CTTTCTTCTGCAAAAATAA | 0.115 |
| AH0948 | SEQ ID NO: 948 | UUUCUUCUGCAAAAAUAAGGA | SEQ ID NO: 2128 | CUUAUUUUUGCAGAAGAAAGA | SEQ ID NO: 3308 | TTTCTTCTGCAAAAATAAG | 0.299 |
| AH0953 | SEQ ID NO: 953 | UCUGCAAAAAUAAGGAAAAGA | SEQ ID NO: 2133 | UUUUCCUUAUUUUUGCAGAAG | SEQ ID NO: 3313 | TCTGCAAAAATAAGGAAAA | 0.188 |
| AH0955 | SEQ ID NO: 955 | UGCAAAAAUAAGGAAAAGAAG | SEQ ID NO: 2135 | UCUUUUCCUUAUUUUUGCAGA | SEQ ID NO: 3315 | TGCAAAAATAAGGAAAAGA | 0.305 |

TABLE 1-13

| double- | | | | | | | β2GPI |
|---|---|---|---|---|---|---|---|
| stranded | | | | antisense strand | | | relative |
| nucleic acid | | sense strand sequence | | sequence | | target β2GPI | expression |
| number | SEQ ID NO: | (5′->3′) | SEQ ID NO: | (5′->3′) | SEQ ID NO: | mRNA sequence | level |
| AH0956 | SEQ ID NO: 956 | GCAAAAAUAAGGAAAAGAAGU | SEQ ID NO: 2136 | UUCUUUUCCUUAUUUUUGCAG | SEQ ID NO: 3316 | GCAAAAATAAGGAAAAGAA | 0.185 |
| AH0957 | SEQ ID NO: 957 | CAAAAAUAAGGAAAAGAAGUG | SEQ ID NO: 2137 | CUUCUUUUCCUUAUUUUUGCA | SEQ ID NO: 3317 | CAAAAATAAGGAAAAGAAG | 0.335 |
| AH0964 | SEQ ID NO: 964 | AAGGAAAAGAAGUGUAGCUAU | SEQ ID NO: 2144 | AGCUACACUUCUUUUCCUUAU | SEQ ID NO: 3324 | AAGGAAAAGAAGTGTAGCT | 0.329 |
| AH0965 | SEQ ID NO: 965 | AGGAAAAGAAGUGUAGCUAUA | SEQ ID NO: 2145 | UAGCUACACUUCUUUUCCUUA | SEQ ID NO: 3325 | AGGAAAAGAAGTGTAGCTA | 0.153 |
| AH0966 | SEQ ID NO: 966 | GGAAAAGAAGUGUAGCUAUAC | SEQ ID NO: 2146 | AUAGCUACACUUCUUUUCCUU | SEQ ID NO: 3326 | GGAAAAGAAGTGTAGCTAT | 0.106 |
| AH0967 | SEQ ID NO: 967 | GAAAAGAAGUGUAGCUAUACA | SEQ ID NO: 2147 | UAUAGCUACACUUCUUUUCCU | SEQ ID NO: 3327 | GAAAAGAAGTGTAGCTATA | 0.097 |
| AH0969 | SEQ ID NO: 969 | AAAGAAGUGUAGCUAUACAGA | SEQ ID NO: 2149 | UGUAUAGCUACACUUCUUUUC | SEQ ID NO: 3329 | AAAGAAGTGTAGCTATACA | 0.228 |
| AH0972 | SEQ ID NO: 972 | GAAGUGUAGCUAUACAGAGGA | SEQ ID NO: 2152 | CUCUGUAUAGCUACACUUCUU | SEQ ID NO: 3332 | GAAGTGTAGCTATACAGAG | 0.293 |
| AH0974 | SEQ ID NO: 974 | AGUGUAGCUAUACAGAGGAUG | SEQ ID NO: 2154 | UCCUCUGUAUAGCUACACUUC | SEQ ID NO: 3334 | AGTGTAGCTATACAGAGGA | 0.160 |
| AH0975 | SEQ ID NO: 975 | GUGUAGCUAUACAGAGGAUGC | SEQ ID NO: 2155 | AUCCUCUGUAUAGCUACACUU | SEQ ID NO: 3335 | GTGTAGCTATACAGAGGAT | 0.227 |
| AH0977 | SEQ ID NO: 977 | GUAGCUAUACAGAGGAUGCUC | SEQ ID NO: 2157 | GCAUCCUCUGUAUAGCUACAC | SEQ ID NO: 3337 | GTAGCTATACAGAGGATGC | 0.285 |
| AH0978 | SEQ ID NO: 978 | UAGCUAUACAGAGGAUGCUCA | SEQ ID NO: 2158 | AGCAUCCUCUGUAUAGCUACA | SEQ ID NO: 3338 | TAGCTATACAGAGGATGCT | 0.245 |
| AH0980 | SEQ ID NO: 980 | GCUAUACAGAGGAUGCUCAGU | SEQ ID NO: 2160 | UGAGCAUCCUCUGUAUAGCUA | SEQ ID NO: 3340 | GCTATACAGAGGATGCTCA | 0.090 |
| AH0981 | SEQ ID NO: 981 | CUAUACAGAGGAUGCUCAGUG | SEQ ID NO: 2161 | CUGAGCAUCCUCUGUAUAGCU | SEQ ID NO: 3341 | CTATACAGAGGATGCTCAG | 0.137 |
| AH0985 | SEQ ID NO: 985 | ACAGAGGAUGCUCAGUGUAUA | SEQ ID NO: 2165 | UACACUGAGCAUCCUCUGUAU | SEQ ID NO: 3345 | ACAGAGGATGCTCAGTGTA | 0.308 |
| AH0987 | SEQ ID NO: 987 | AGAGGAUGCUCAGUGUAUAGA | SEQ ID NO: 2167 | UAUACACUGAGCAUCCUCUGU | SEQ ID NO: 3347 | AGAGGATGCTCAGTGTATA | 0.082 |
| AH0988 | SEQ ID NO: 988 | GAGGAUGCUCAGUGUAUAGAU | SEQ ID NO: 2168 | CUAUACACUGAGCAUCCUCUG | SEQ ID NO: 3348 | GAGGATGCTCAGTGTATAG | 0.292 |
| AH0989 | SEQ ID NO: 989 | AGGAUGCUCAGUGUAUAGAUG | SEQ ID NO: 2169 | UCUAUACACUGAGCAUCCUCU | SEQ ID NO: 3349 | AGGATGCTCAGTGTATAGA | 0.338 |
| AH0990 | SEQ ID NO: 990 | GGAUGCUCAGUGUAUAGAUGG | SEQ ID NO: 2170 | AUCUAUACACUGAGCAUCCUC | SEQ ID NO: 3350 | GGATGCTCAGTGTATAGAT | 0.252 |
| AH0991 | SEQ ID NO: 991 | GAUGCUCAGUGUAUAGAUGGC | SEQ ID NO: 2171 | CAUCUAUACACUGAGCAUCCU | SEQ ID NO: 3351 | GATGCTCAGTGTATAGATG | 0.111 |
| AH0996 | SEQ ID NO: 996 | UCAGUGUAUAGAUGGCACUAU | SEQ ID NO: 2176 | AGUGCCAUCUAUACACUGAGC | SEQ ID NO: 3356 | TCAGTGTATAGATGGCACT | 0.233 |
| AH0997 | SEQ ID NO: 997 | CAGUGUAUAGAUGGCACUAUC | SEQ ID NO: 2177 | UAGUGCCAUCUAUACACUGAG | SEQ ID NO: 3357 | CAGTGTATAGATGGCACTA | 0.290 |
| AH0998 | SEQ ID NO: 998 | AGUGUAUAGAUGGCACUAUCG | SEQ ID NO: 2178 | AUAGUGCCAUCUAUACACUGA | SEQ ID NO: 3358 | AGTGTATAGATGGCACTAT | 0.199 |
| AH0999 | SEQ ID NO: 999 | GUGUAUAGAUGGCACUAUCGA | SEQ ID NO: 2179 | GAUAGUGCCAUCUAUACACUG | SEQ ID NO: 3359 | GTGTATAGATGGCACTATC | 0.101 |
| AH1000 | SEQ ID NO: 1000 | UGUAUAGAUGGCACUAUCGAA | SEQ ID NO: 2180 | CGAUAGUGCCAUCUAUACACU | SEQ ID NO: 3360 | TGTATAGATGGCACTATCG | 0.310 |
| AH1001 | SEQ ID NO: 1001 | GUAUAGAUGGCACUAUCGAAG | SEQ ID NO: 2181 | UCGAUAGUGCCAUCUAUACAC | SEQ ID NO: 3361 | GTATAGATGGCACTATCGA | 0.082 |
| AH1002 | SEQ ID NO: 1002 | UAUAGAUGGCACUAUCGAAGU | SEQ ID NO: 2182 | UUCGAUAGUGCCAUCUAUACA | SEQ ID NO: 3362 | TATAGATGGCACTATCGAA | 0.084 |
| AH1003 | SEQ ID NO: 1003 | AUAGAUGGCACUAUCGAAGUC | SEQ ID NO: 2183 | CUUCGAUAGUGCCAUCUAUAC | SEQ ID NO: 3363 | ATAGATGGCACTATCGAAG | 0.265 |
| AH1005 | SEQ ID NO: 1005 | AGAUGGCACUAUCGAAGUCCC | SEQ ID NO: 2185 | GACUUCGAUAGUGCCAUCUAU | SEQ ID NO: 3365 | AGATGGCACTATCGAAGTC | 0.100 |
| AH1007 | SEQ ID NO: 1007 | AUGGCACUAUCGAAGUCCCCA | SEQ ID NO: 2187 | GGGACUUCGAUAGUGCCAUCU | SEQ ID NO: 3367 | ATGGCACTATCGAAGTCCC | 0.232 |
| AH1009 | SEQ ID NO: 1009 | GGCACUAUCGAAGUCCCCAAA | SEQ ID NO: 2189 | UGGGGACUUCGAUAGUGCCAU | SEQ ID NO: 3369 | GGCACTATCGAAGTCCCCA | 0.122 |
| AH1010 | SEQ ID NO: 1010 | GCACUAUCGAAGUCCCCAAAU | SEQ ID NO: 2190 | UUGGGGACUUCGAUAGUGCCA | SEQ ID NO: 3370 | GCACTATCGAAGTCCCCAA | 0.089 |
| AH1011 | SEQ ID NO: 1011 | CACUAUCGAAGUCCCCAAAUG | SEQ ID NO: 2191 | UUUGGGGACUUCGAUAGUGCC | SEQ ID NO: 3371 | CACTATCGAAGTCCCCAAA | 0.154 |
| AH1013 | SEQ ID NO: 1013 | CUAUCGAAGUCCCCAAAUGCU | SEQ ID NO: 2193 | CAUUUGGGGACUUCGAUAGUG | SEQ ID NO: 3373 | CTATCGAAGTCCCCAAATG | 0.139 |
| AH1015 | SEQ ID NO: 1015 | AUCGAAGUCCCCAAAUGCUUC | SEQ ID NO: 2195 | AGCAUUUGGGGACUUCGAUAG | SEQ ID NO: 3375 | ATCGAAGTCCCCAAATGCT | 0.125 |
| AH1016 | SEQ ID NO: 1016 | UCGAAGUCCCCAAAUGCUUCA | SEQ ID NO: 2196 | AAGCAUUUGGGGACUUCGAUA | SEQ ID NO: 3376 | TCGAAGTCCCCAAATGCTT | 0.112 |
| AH1017 | SEQ ID NO: 1017 | CGAAGUCCCCAAAUGCUUCAA | SEQ ID NO: 2197 | GAAGCAUUUGGGGACUUCGAU | SEQ ID NO: 3377 | CGAAGTCCCCAAATGCTTC | 0.109 |
| AH1018 | SEQ ID NO: 1018 | GAAGUCCCCAAAUGCUUCAAG | SEQ ID NO: 2198 | UGAAGCAUUUGGGGACUUCGA | SEQ ID NO: 3378 | GAAGTCCCCAAATGCTTCA | 0.170 |
| AH1021 | SEQ ID NO: 1021 | GUCCCCAAAUGCUUCAAGGAA | SEQ ID NO: 2201 | CCUUGAAGCAUUUGGGGACUU | SEQ ID NO: 3381 | GTCCCCAAATGCTTCAAGG | 0.261 |
| AH1022 | SEQ ID NO: 1022 | UCCCCAAAUGCUUCAAGGAAC | SEQ ID NO: 2202 | UCCUUGAAGCAUUUGGGGACU | SEQ ID NO: 3382 | TCCCCAAATGCTTCAAGGA | 0.074 |
| AH1023 | SEQ ID NO: 1023 | CCCCAAAUGCUUCAAGGAACA | SEQ ID NO: 2203 | UUCCUUGAAGCAUUUGGGGAC | SEQ ID NO: 3383 | CCCCAAATGCTTCAAGGAA | 0.154 |
| AH1024 | SEQ ID NO: 1024 | CCCAAAUGCUUCAAGGAACAC | SEQ ID NO: 2204 | GUUCCUUGAAGCAUUUGGGGA | SEQ ID NO: 3384 | CCCAAATGCTTCAAGGAAC | 0.108 |
| AH1025 | SEQ ID NO: 1025 | CCAAAUGCUUCAAGGAACACA | SEQ ID NO: 2205 | UGUUCCUUGAAGCAUUUGGGG | SEQ ID NO: 3385 | CCAAATGCTTCAAGGAACA | 0.056 |
| AH1026 | SEQ ID NO: 1026 | CAAAUGCUUCAAGGAACACAG | SEQ ID NO: 2206 | GUGUUCCUUGAAGCAUUUGGG | SEQ ID NO: 3386 | CAAATGCTTCAAGGAACAC | 0.325 |
| AH1027 | SEQ ID NO: 1027 | AAAUGCUUCAAGGAACACAGU | SEQ ID NO: 2207 | UGUGUUCCUUGAAGCAUUUGG | SEQ ID NO: 3387 | AAATGCTTCAAGGAACACA | 0.158 |
| AH1028 | SEQ ID NO: 1028 | AAUGCUUCAAGGAACACAGUU | SEQ ID NO: 2208 | CUGUGUUCCUUGAAGCAUUUG | SEQ ID NO: 3388 | AATGCTTCAAGGAACACAG | 0.257 |

TABLE 1-14

| double- | | | | | | | β2GPI |
|---|---|---|---|---|---|---|---|
| stranded | | | | antisense strand | | | relative |
| nucleic acid | | sense strand sequence | | sequence | | target 132GPI | expression |
| number | SEQ ID NO: | (5′->3′) | SEQ ID NO: | (5′->3′) | SEQ ID NO: | mRNA sequence | level |
| AH1029 | SEQ ID NO: 1029 | AUGCUUCAAGGAACACAGUUC | SEQ ID NO: 2209 | ACUGUGUUCCUUGAAGCAUUU | SEQ ID NO: 3389 | ATGCTTCAAGGAACACAGT | 0.175 |
| AH1030 | SEQ ID NO: 1030 | UGCUUCAAGGAACACAGUUCU | SEQ ID NO: 2210 | AACUGUGUUCCUUGAAGCAUU | SEQ ID NO: 3390 | TGCTTCAAGGAACACAGTT | 0.200 |
| AH1031 | SEQ ID NO: 1031 | GCUUCAAGGAACACAGUUCUC | SEQ ID NO: 2211 | GAACUGUGUUCCUUGAAGCAU | SEQ ID NO: 3391 | GCTTCAAGGAACACAGTTC | 0.074 |
| AH1032 | SEQ ID NO: 1032 | CUUCAAGGAACACAGUUCUCU | SEQ ID NO: 2212 | AGAACUGUGUUCCUUGAAGCA | SEQ ID NO: 3392 | CTTCAAGGAACACAGTTCT | 0.083 |
| AH1034 | SEQ ID NO: 1034 | UCAAGGAACACAGUUCUCUGG | SEQ ID NO: 2214 | AGAGAACUGUGUUCCUUGAAG | SEQ ID NO: 3394 | TCAAGGAACACAGTTCTCT | 0.279 |
| AH1035 | SEQ ID NO: 1035 | CAAGGAACACAGUUCUCUGGC | SEQ ID NO: 2215 | CAGAGAACUGUGUUCCUUGAA | SEQ ID NO: 3395 | CAAGGAACACAGTTCTCTG | 0.238 |
| AH1038 | SEQ ID NO: 1038 | GGAACACAGUUCUCUGGCUUU | SEQ ID NO: 2218 | AGCCAGAGAACUGUGUUCCUU | SEQ ID NO: 3398 | GGAACACAGTTCTCTGGCT | 0.067 |
| AH1039 | SEQ ID NO: 1039 | GAACACAGUUCUCUGGCUUUU | SEQ ID NO: 2219 | AAGCCAGAGAACUGUGUUCCU | SEQ ID NO: 3399 | GAACACAGTTCTCTGGCTT | 0.072 |
| AH1040 | SEQ ID NO: 1040 | AACACAGUUCUCUGGCUUUUU | SEQ ID NO: 7220 | AAAGCCAGAGAACUGUGUUCC | SEQ ID NO: 3400 | AACACAGTTCTCTGGCTTT | 0.094 |
| AH1041 | SEQ ID NO: 1041 | ACACAGUUCUCUGGCUUUUUG | SEQ ID NO: 7221 | AAAAGCCAGAGAACTGTGTTC | SEQ ID NO: 3401 | ACACAGTTCTCTGGCTTTT | 0.071 |
| AH1042 | SEQ ID NO: 1042 | CACAGUUCUCUGGCUUUUUGG | SEQ ID NO: 2222 | AAAAAGCCAGAGAACUGUGUU | SEQ ID NO: 3402 | CACAGTTCTCTGGCTTTTT | 0.143 |
| AH1043 | SEQ ID NO: 1043 | ACAGUUCUCUGGCUUUUUGGA | SEQ ID NO: 2223 | CAAAAAGCCAGAGAACUGUGU | SEQ ID NO: 3403 | ACAGTTCTCTGGCTTTTTG | 0.082 |
| AH1044 | SEQ ID NO: 1044 | CAGUUCUCUGGCUUUUUGGAA | SEQ ID NO: 2724 | CCAAAAAGCCAGAGAACUGUG | SEQ ID NO: 3404 | CAGTTCTCTGGCTTTTTGG | 0.199 |
| AH1045 | SEQ ID NO: 1045 | AGUUCUCUGGCUUUUUGGAAA | SEQ ID NO: 7225 | UCCAAAAAGCCAGAGAACUGU | SEQ ID NO: 3405 | AGTICTCTGGCTTTTTGGA | 0.108 |
| AH1046 | SEQ ID NO: 1046 | GUUCUCUGGCUUUUUGGAAAA | SEQ ID NO: 2276 | UUCCAAAAAGCCAGAGAACUG | SEQ ID NO: 3406 | GTTCTCTGGCTTTTTGGAA | 0.156 |
| AH1047 | SEQ ID NO: 1047 | UUCUCUGGCUUUUUGGAAAAC | SEQ ID NO: 2227 | UUUCCAAAAAGCCAGAGAACU | SEQ ID NO: 3407 | TTCTCTGGCTTTTTGGAAA | 0.111 |
| AH1048 | SEQ ID NO: 1048 | UCUCUGGCUUUUUGGAAAACU | SEQ ID NO: 2228 | UUUUCCAAAAAGCCAGAGAAC | SEQ ID NO: 3408 | TCTCTGGCTTTTTGGAAAA | 0.313 |
| AH1051 | SEQ ID NO: 1051 | CUGGCUUUUUGGAAAACUGAU | SEQ ID NO: 2231 | CAGUUUUCCAAAAAGCCAGAG | SEQ ID NO: 3411 | CTGGCTTTTTGGAAAACTG | 0.152 |
| AH1052 | SEQ ID NO: 1052 | UGGCUUUUUGGAAAACUGAUG | SEQ ID NO: 2232 | UCAGUUUUCCAAAAAGCCAGA | SEQ ID NO: 3412 | TGGCTTTTTGGAAAACTGA | 0.097 |
| AH1053 | SEQ ID NO: 1053 | GGCUUUUUGGAAAACUGAUGC | SEQ ID NO: 2233 | AUCAGUUUUCCAAAAAGCCAG | SEQ ID NO: 3413 | GGCTTTTTGGAAAACTGAT | 0.162 |
| AH1054 | SEQ ID NO: 1054 | GCUUUUUGGAAAACUGAUGCA | SEQ ID NO: 2234 | CAUCAGUUUUCCAAAAAGCCA | SEQ ID NO: 3414 | GCTTITTGGAAAACTGATG | 0.200 |
| AH1056 | SEQ ID NO: 1056 | UUUUUGGAAAACUGAUGCAUC | SEQ ID NO: 2236 | UGCAUCAGUUUUCCAAAAAGC | SEQ ID NO: 3416 | TTTTTGGAAAACTGATGCA | 0.342 |
| AH1057 | SEQ ID NO: 1057 | UUUUGGAAAACUGAUGCAUCC | SEQ ID NO: 2237 | AUGCAUCAGUUUUCCAMAAG | SEQ ID NO: 3417 | TTTTGGAAAACTGATGCAT | 0.230 |
| AH1061 | SEQ ID NO: 1061 | GGAAAACUGAUGCAUCCGAUG | SEQ ID NO: 2241 | UCGGAUGCAUCAGUUUUCCAA | SEQ ID NO: 3421 | GGAAAACTGATGCATCCGA | 0.128 |
| AH1062 | SEQ ID NO: 1062 | GAAAACUGAUGCAUCCGAUGU | SEQ ID NO: 2242 | AUCGGAUGCAUCAGUUUUCCA | SEQ ID NO: 3422 | GAAAACTGATGCATCCGAT | 0.182 |
| AH1063 | SEQ ID NO: 1063 | AAAACUGAUGCAUCCGAUGUA | SEQ ID NO: 2243 | CAUCGGAUGCAUCAGUUUUCC | SEQ ID NO: 3423 | AAAACTGATGCATCCGATG | 0.229 |
| AH1064 | SEQ ID NO: 1064 | AAACUGAUGCAUCCGAUGUAA | SEQ ID NO: 2244 | ACAUCGGAUGCAUCAGUUUUC | SEQ ID NO: 3424 | AAACTGATGCATCCGATGT | 0.336 |
| AH1065 | SEQ ID NO: 1065 | AACUGAUGCAUCCGAUGUAAA | SEQ ID NO: 2245 | UACAUCGGAUGCAUCAGUUUU | SEQ ID NO: 3425 | AACTGATGCATCCGATGTA | 0.216 |
| AH1067 | SEQ ID NO: 1067 | CUGAUGCAUCCGAUGUAAAGC | SEQ ID NO: 2247 | UUUACAUCGGAUGCAUCAGUU | SEQ ID NO: 3427 | CTGATGCATCCGATGTAAA | 0.241 |
| AH1068 | SEQ ID NO: 1068 | UGAUGCAUCCGAUGUAAAGCC | SEQ ID NO: 2248 | CUUUACAUCGGAUGCAUCAGU | SEQ ID NO: 3428 | TGATGCATCCGATGTAAAG | 0.329 |
| AH1072 | SEQ ID NO: 1072 | GCAUCCGAUGUAAAGCCAUGC | SEQ ID NO: 2252 | AUGGCUUUACAUCGGAUGCAU | SEQ ID NO: 3432 | GCATCCGATGTAAAGCCAT | 0.197 |
| AH1073 | SEQ ID NO: 1073 | CAUCCGAUGUAAAGCCAUGCU | SEQ ID NO: 2253 | CAUGGCUUUACAUCGGAUGCA | SEQ ID NO: 3433 | CATCCGATGTAAAGCCATG | 0.120 |
| AH1076 | SEQ ID NO: 1076 | CCGAUGUAAAGCCAUGCUAAG | SEQ ID NO: 2256 | UAGCAUGGCUUUACAUCGGAU | SEQ ID NO: 3436 | CCGATGTAAAGCCATGCTA | 0.219 |
| AH1077 | SEQ ID NO: 1077 | CGAUGUAAAGCCAUGCUAAGG | SEQ ID NO: 2257 | UUAGCAUGGCUUUACAUCGGA | SEQ ID NO: 3437 | CGATGTAAAGCCATGCTAA | 0.061 |
| AH1078 | SEQ ID NO: 1078 | GAUGUAAAGCCAUGCUAAGGU | SEQ ID NO: 2258 | CUUAGCAUGGCUUUACAUCGG | SEQ ID NO: 3438 | GATGTAAAGCCATGCTAAG | 0.131 |
| AH1083 | SEQ ID NO: 1083 | AAAGCCAUGCUAAGGUGGUUU | SEQ ID NO: 2263 | ACCACCUUAGCAUGGCUUUAC | SEQ ID NO: 3443 | AAAGCCATGCTAAGGTGGT | 0.239 |
| AH1084 | SEQ ID NO: 1084 | AAGCCAUGCUAAGGUGGUUUU | SEQ ID NO: 2264 | AACCACCUUAGCAUGGCUUUA | SEQ ID NO: 3444 | AAGCCATGCTAAGGTGGTT | 0.139 |
| AH1085 | SEQ ID NO: 1085 | AGCCAUGCUAAGGUGGUUUUC | SEQ ID NO: 2265 | AAACCACCUUAGCAUGGCUUU | SEQ ID NO: 3445 | AGCCATGCTAAGGTGGTTT | 0.166 |
| AH1086 | SEQ ID NO: 1086 | GCCAUGCUAAGGUGGUUUUCA | SEQ ID NO: 2266 | AAAACCACCUUAGCAUGGCUU | SEQ ID NO: 3446 | GCCATGCTAAGGTGGTTTT | 0.100 |
| AH1087 | SEQ ID NO: 1087 | CCAUGCUAAGGUGGUUUUCAG | SEQ ID NO: 2267 | GAAAACCACCUUAGCAUGGCU | SEQ ID NO: 3447 | CCATGCTAAGGIGGTTTTC | 0.233 |
| AH1088 | SEQ ID NO: 1088 | CAUGCUAAGGUGGUUUUCAGA | SEQ ID NO: 2268 | UGAAAACCACCUUAGCAUGGC | SEQ ID NO: 3448 | CATGCTAAGGIGGTTTTCA | 0.072 |
| AH1089 | SEQ ID NO: 1089 | AUGCUAAGGUGGUUUUCAGAU | SEQ ID NO: 2269 | CUGAAAACCACCUUAGCAUGG | SEQ ID NO: 3449 | ATGCTAAGGTGGTTTTCAG | 0.175 |
| AH1090 | SEQ ID NO: 1090 | UGCUAAGGUGGUUUUCAGAUU | SEQ ID NO: 2270 | UCUGAAAACCACCUUAGCAUG | SEQ ID NO: 3450 | TGCTAAGGIGGITTTCAGA | 0.130 |
| AH1092 | SEQ ID NO: 1092 | CUAAGGUGGUUUUCAGAUUCC | SEQ ID NO: 2272 | AAUCUGAAAACCACCUUAGCA | SEQ ID NO: 3452 | CTAAGGTGGTITTCAGATT | 0.065 |
| AH1093 | SEQ ID NO: 1093 | UAAGGUGGUUUUCAGAUUCCA | SEQ ID NO: 2273 | GAAUCUGAAAACCACCUUAGC | SEQ ID NO: 3453 | TAAGGTGGTTTTCAGATTC | 0.141 |
| AH1095 | SEQ ID NO: 1095 | AGGUGGUUUUCAGAUUCCACA | SEQ ID NO: 2275 | UGGAAUCUGAAAACCACCUUA | SEQ ID NO: 3455 | AGGTGGITTTCAGATTCCA | 0.044 |

TABLE 1-15

| double- | | | | | | | β2GPI |
|---|---|---|---|---|---|---|---|
| stranded | | | | antisense strand | | | relative |
| nucleic acid | | sense strand sequence | | sequence | | target β2GPI | expression |
| number | SEQ ID NO: | (5′->3′) | SEQ ID NO: | (5′->3) | SEQ ID NO: | mRNA sequence | level |
| AH1096 | SEQ ID NO: 1096 | GGUGGUUUUCAGAUUCCACAC | SEQ ID NO: 2276 | GUGGAAUCUGAAAACCACCUU | SEQ ID NO: 3456 | GGTGGTTTTCAGATTCCAC | 0.076 |
| AH1097 | SEQ ID NO: 1097 | GUGGUUUUCAGAUUCCACACA | SEQ ID NO: 2277 | UGUGGAAUCUGAAAACCACCU | SEQ ID NO: 3457 | GTGGITTTCAGATTCCACA | 0.045 |
| AH1099 | SEQ ID NO: 1099 | GGUUUUCAGAUUCCACACAAA | SEQ ID NO: 2279 | UGUGUGGAAUCUGAAAACCAC | SEQ ID NO: 3459 | GGTTTTCAGATTCCACACA | 0.140 |
| AH1100 | SEQ ID NO: 1100 | GUUUUCAGAUUCCACACAAAA | SEQ ID NO: 2280 | UUGUGUGGAAUCUGAAAACCA | SEQ ID NO: 3460 | GYITTCAGATTCCACACAA | 0.120 |
| AH1101 | SEQ ID NO: 1101 | UUUUCAGAUUCCACACAAAAU | SEQ ID NO: 2281 | UUUGUGUGGAAUCUGAAAACC | SEQ ID NO: 3461 | TITTCAGATTCCACACAAA | 0.121 |
| AH1102 | SEQ ID NO: 1102 | UUUCAGAUUCCACACAAAAUG | SEQ ID NO: 2282 | UUUUGUGUGGAAUCUGAAAAC | SEQ ID NO: 3462 | TTTCAGATTCCACACAAAA | 0.281 |
| AH1103 | SEQ ID NO: 1103 | UUCAGAUUCCACACAAAAUGU | SEQ ID NO: 2283 | AUUUUGUGUGGAAUCUGAAAA | SEQ ID NO: 3463 | TTCAGATTCCACACAAAAT | 0.197 |
| AH1104 | SEQ ID NO: 1104 | UCAGAUUCCACACAAAAUGUC | SEQ ID NO: 2284 | CAUUUUGUGUGGAAUCUGAAA | SEQ ID NO: 3464 | TCAGATTCCACACAAAATG | 0.274 |
| AH1105 | SEQ ID NO: 1105 | CAGAUUCCACACAAAAUGUCA | SEQ ID NO: 2285 | ACAUUUUGUGUGGAAUCUGAA | SEQ ID NO: 3465 | CAGATTCCACACAAAATGT | 0.193 |
| AH1106 | SEQ ID NO: 1106 | AGAUUCCACACAAAAUGUCAC | SEQ ID NO: 2286 | GACAUUUUGUGUGGAAUCUGA | SEQ ID NO: 3466 | AGATTCCACACAAAATGTC | 0.175 |
| AH1107 | SEQ ID NO: 1107 | GAUUCCACACAAAAUGUCACA | SEQ ID NO: 2287 | UGACAUUUUGUGUGGAAUCUG | SEQ ID NO: 3467 | GATTCCACACAAAATGTCA | 0.095 |
| AH1109 | SEQ ID NO: 1109 | UUCCACACAAAAUGUCACACU | SEQ ID NO: 2289 | UGUGACAUUUUGUGUGGAAUC | SEQ ID NO: 3469 | TTCCACACAAAATGTCACA | 0.193 |
| AH1111 | SEQ ID NO: 1111 | CCACACAAAAUGUCACACUUG | SEQ ID NO: 2291 | AGUGUGACAUUUUGUGUGGAA | SEQ ID NO: 3471 | CCACACAAAATGTCACACT | 0.147 |
| AH1112 | SEQ ID NO: 1112 | CACACAAAAUGUCACACUUGU | SEQ ID NO: 2292 | AAGUGUGACAUUUUGUGUGGA | SEQ ID NO: 3472 | CACACAAAATGTCACACTT | 0.067 |
| AH1113 | SEQ ID NO: 1113 | ACACAAAAUGUCACACUUGUU | SEQ ID NO: 2293 | CAAGUGUGACAUUUUGUGUGG | SEQ ID NO: 3473 | ACACAAAATGTCACACTTG | 0.186 |
| AH1114 | SEQ ID NO: 1114 | CACAAAAUGUCACACUUGUUU | SEQ ID NO: 2294 | ACAAGUGUGACAUUUUGUGUG | SEQ ID NO: 3474 | CACAAAATGTCACACTTGT | 0.082 |
| AH1115 | SEQ ID NO: 1115 | ACAAAAUGUCACACUUGUUUC | SEQ ID NO: 2295 | AACAAGUGUGACAUUUUGUGU | SEQ ID NO: 3475 | ACAAAATGTCACACTTGTT | 0.229 |
| AH1116 | SEQ ID NO: 1116 | CAAAAUGUCACACUUGUUUCU | SEQ ID NO: 2296 | AAACAAGUGUGACAUUUUGUG | SEQ ID NO: 3476 | CAAAATGTCACACTIGTTT | 0.074 |
| AH1118 | SEQ ID NO: 1118 | AAAUGUCACACUUGUUUCUUG | SEQ ID NO: 2298 | AGAAACAAGUGUGACAUUUUG | SEQ ID NO: 3478 | AAATGTCACACTTGTTTCT | 0.073 |
| AH1120 | SEQ ID NO: 1120 | AUGUCACACUUGUUUCUUGUU | SEQ ID NO: 2300 | CAAGAAACAAGUGUGACAUUU | SEQ ID NO: 3480 | ATGTCACACTTGTTTCTTG | 0.140 |
| AH1121 | SEQ ID NO: 1121 | UGUCACACUUGUUUCUUGUUC | SEQ ID NO: 2301 | ACAAGAAACAAGUGUGACAUU | SEQ ID NO: 3481 | TGTCACACTTGITTCTIGT | 0.090 |
| AH1122 | SEQ ID NO: 1122 | GUCACACUUGUUUCUUGUUCA | SEQ ID NO: 2302 | AACAAGAAACAAGUGUGACAU | SEQ ID NO: 3482 | GTCACACTIGTTICTTGTT | 0.085 |
| AH1124 | SEQ ID NO: 1124 | CACACUUGUUUCUUGUUCAUC | SEQ ID NO: 2304 | UGAACMGAAACAAGUGUGAC | SEQ ID NO: 3484 | CACACTTGTTTCTTGTTCA | 0.050 |
| AH1125 | SEQ ID NO: 1125 | ACACUUGUUUCUUGUUCAUCC | SEQ ID NO: 2305 | AUGAACAAGAAACAAGUGUGA | SEQ ID NO: 3485 | ACACTIGTTTCTIGTTCAT | 0.065 |
| AH1127 | SEQ ID NO: 1127 | ACUUGUUUCUUGUUCAUCCAA | SEQ ID NO: 2307 | GGAUGAACAAGAAACAAGUGU | SEQ ID NO: 3487 | ACTIGTTICTIGTTCATCC | 0.169 |
| AH1128 | SEQ ID NO: 1128 | CUUGUUUCUUGUUCAUCCAAG | SEQ ID NO: 2308 | UGGAUGAACAAGAAACAAGUG | SEQ ID NO: 3488 | CTIGTTICTIGTICATCCA | 0.029 |
| AH1129 | SEQ ID NO: 1129 | UUGUUUCUUGUUCAUCCAAGG | SEQ ID NO: 2309 | UUGGAUGAACAAGAAACAAGU | SEQ ID NO: 3489 | TTGTTTCTTGTTCATCCAA | 0.065 |
| AH1130 | SEQ ID NO: 1130 | UGUUUCUUGUUCAUCCAAGGA | SEQ ID NO: 2310 | CUUGGAUGAACAAGAAACAAG | SEQ ID NO: 3490 | TGTTTCTTGTTCATCCAAG | 0.307 |
| AH1131 | SEQ ID NO: 1131 | GUUUCUUGUUCAUCCAAGGAA | SEQ ID NO: 2311 | CCUUGGAUGAACAAGAAACAA | SEQ ID NO: 3491 | GTTTCTTGTTCATCCAAGG | 0.163 |
| AH1133 | SEQ ID NO: 1133 | UUCUUGUUCAUCCAAGGAACC | SEQ ID NO: 2313 | UUCCUUGGAUGAACAAGAAAC | SEQ ID NO: 3493 | TTCTTGTTCATCCAAGGAA | 0.196 |
| AH1134 | SEQ ID NO: 1134 | UCUUGUUCAUCCAAGGAACCU | SEQ ID NO: 2314 | GUUCCUUGGAUGAACAAGAAA | SEQ ID NO: 3494 | TCTIGTTCATCCAAGGAAC | 0.261 |
| AH1135 | SEQ ID NO: 1135 | CUUGUUCAUCCAAGGAACCUA | SEQ ID NO: 2315 | GGUUCCUUGGAUGAACAAGAA | SEQ ID NO: 3495 | CTTGTTCATCCAAGGAACC | 0.145 |
| AH1136 | SEQ ID NO: 1136 | UUGUUCAUCCAAGGAACCUAA | SEQ ID NO: 2316 | AGGUUCCUUGGAUGAACAAGA | SEQ ID NO: 3496 | TTGTTCATCCAAGGAACCT | 0.219 |
| AH1137 | SEQ ID NO: 1137 | UGUUCAUCCAAGGAACCUAAU | SEQ ID NO: 2317 | UAGGUUCCUUGGAUGAACAAG | SEQ ID NO: 3497 | TGTTCATCCAAGGAACCTA | 0.044 |
| AH1138 | SEQ ID NO: 1138 | GUUCAUCCAAGGAACCUAAUU | SEQ ID NO: 2318 | UUAGGUUCCUUGGAUGAACAA | SEQ ID NO: 3498 | GTTCATCCAAGGAACCTAA | 0.036 |
| AH1139 | SEQ ID NO: 1139 | UUCAUCCAAGGAACCUAAUUG | SEQ ID NO: 2319 | AUUAGGUUCCUUGGAUGAACA | SEQ ID NO: 3499 | TTCATCCAAGGAACCTAAT | 0.061 |
| AH1140 | SEQ ID NO: 1140 | UCAUCCAAGGAACCUAAUUGA | SEQ ID NO: 2320 | AAUUAGGUUCCUUGGAUGAAC | SEQ ID NO: 3500 | TCATCCAAGGAACCTAATT | 0.110 |
| AH1141 | SEQ ID NO: 1141 | CAUCCAAGGAACCUAAUUGAA | SEQ ID NO: 2321 | CAAUUAGGUUCCUUGGAUGAA | SEQ ID NO: 3501 | CATCCAAGGAACCTAATTG | 0.063 |
| AH1142 | SEQ ID NO: 1142 | AUCCAAGGAACCUAAUUGAAA | SEQ ID NO: 2322 | UCAAUUAGGUUCCUUGGAUGA | SEQ ID NO: 3502 | ATCCAAGGAACCTAATTGA | 0.045 |
| AH1143 | SEQ ID NO: 1143 | UCCAAGGAACCUAAUUGAAAU | SEQ ID NO: 2323 | UUCAAUUAGGUUCCUUGGAUG | SEQ ID NO: 3503 | TCCAAGGAACCTAATTGAA | 0.042 |
| AH1144 | SEQ ID NO: 1144 | CCAAGGAACCUAAUUGAAAUU | SEQ ID NO: 2324 | UUUCAAUUAGGUUCCUUGGAU | SEQ ID NO: 3504 | CCAAGGAACCTAATTGAAA | 0.036 |
| AH1145 | SEQ ID NO: 1145 | CAAGGAACCUAAUUGAAAUUU | SEQ ID NO: 2325 | AUUUCAAUUAGGUUCCUUGGA | SEQ ID NO: 3505 | CAAGGAACCTAATTGAAAT | 0.042 |
| AH1146 | SEQ ID NO: 1146 | AAGGAACCUAAUUGAAAUUUA | SEQ ID NO: 2326 | AAUUUCAAUUAGGUUCCUUGG | SEQ ID NO: 3506 | AAGGAACCTAATTGAAATT | 0.056 |
| AH1147 | SEQ ID NO: 1147 | AGGAACCUAAUUGAAAUUUAA | SEQ ID NO: 2327 | AAAUUUCAAUUAGGUUCCUUG | SEQ ID NO: 3507 | AGGAACCTAATTGAAATTT | 0.244 |
| AH1148 | SEQ ID NO: 1148 | GGAACCUAAUUGAAAUUUAAA | SEQ ID NO: 2328 | UAAAUUUCAAUUAGGUUCCUU | SEQ ID NO: 3508 | GGAACCTAATTGAAATTTA | 0.037 |
| AH1149 | SEQ ID NO: 1149 | GAACCUAAUUGAAAUUUAAAA | SEQ ID NO: 2329 | UUAAAUUUCAAUUAGGUUCCU | SEQ ID NO: 3509 | GAACCTAATTGAAATTTAA | 0.034 |

TABLE 1-16

| double- | | | | | | | |
|---|---|---|---|---|---|---|---|
| stranded | | | | antisense | | | β2GPI |
| nucleic | | sense strand | | strand | | | relative |
| acid | | sequence | | sequence | | target β2GPI | expression |
| number | SEQ ID NO: | (5′->3′) | SEQ ID NO: | (5′->3′) | SEQ ID NO: | mRNA sequence | level |
| AH1150 | SEQ ID NO: | AACCUAAUUGAAA | SEQ ID NO: | UUUAAAUUUCA | SEQ ID NO: | AACCTAATTGAAA | 0.097 |
| | 1150 | UUUAAAAA | 2330 | AUUAGGUUCC | 3510 | TTTAAA | |
| AH1151 | SEQ ID NO: | ACCUAAUUGAAAU | SEQ ID NO: | UUUUAAAUUUC | SEQ ID NO: | ACCTAATTGAAAT | 0.330 |
| | 1151 | UUAAAAAU | 2331 | AAUUAGGUUC | 3511 | TTAAAA | |
| AH1155 | SEQ ID NO: | AAUUGAAAUUUAA | SEQ ID NO: | UUAUUUUUAAA | SEQ ID NO: | AATTGAAATTTAA | 0.318 |
| | 1155 | AAAUAAAG | 2335 | UUUCAAUUAG | 3515 | AAATAA | |
| AH1167 | SEQ ID NO: | AAAAUAAAGCUAC | SEQ ID NO: | AAUUCAGUAGC | SEQ ID NO: | AAAATAAAGCTAC | 0.313 |
| | 1167 | UGAAUUUA | 2347 | UUUAUUUUUA | 3527 | TGAATT | |
| AH1168 | SEQ ID NO: | AAAUAAAGCUAC | SEQ ID NO: | AAAUUCAGUAG | SEQ ID NO: | AAATAAAGCTACT | 0.082 |
| | 1168 | UGAAUUUAU | 2348 | CUUUAUUUUU | 3528 | GAATTT | |
| AH1169 | SEQ ID NO: | AAUAAAGCUACU | SEQ ID NO: | UAAAUUCAGUA | SEQ ID NO: | AATAAAGCTACTG | 0.174 |
| | 1169 | GAAUUUAUU | 2349 | GCUUUAUUUU | 3529 | AATTTA | |
| AH1171 | SEQ ID NO: | UAAAGCUACUGA | SEQ ID NO: | AAUAAAUUCAG | SEQ ID NO: | TAAAGCTACTGAA | 0.191 |
| | 1171 | AUUUAUUGC | 2351 | UAGCUUUAUU | 3531 | TTTATT | |
| AH1175 | SEQ ID NO: | GCUACUGAAUUU | SEQ ID NO: | CGGCAAUAAAU | SEQ ID NO: | GCTACTGAATTTA | 0.156 |
| | 1175 | AUUGCCGCA | 2355 | UCAGUAGCUU | 3535 | TTGCCG | |
| AH1176 | SEQ ID NO: | CUACUGAAUUUA | SEQ ID NO: | GCGGCAAUAAA | SEQ ID NO: | CTACTGAATTTAT | 0.230 |
| | 1176 | UUGCCGCAC | 2356 | UUCAGUAGCU | 3536 | TGCCGC | |
| AH1177 | SEQ ID NO: | UACUGAAUUUAU | SEQ ID NO: | UGCGGCAAUAA | SEQ ID NO: | TACTGAATTTATT | 0.155 |
| | 1177 | UGCCGCACC | 2357 | AUUCAGUAGC | 3537 | GCCGCA | |
| AH1178 | SEQ ID NO: | ACUGAAUUUAUU | SEQ ID NO: | GUGCGGCAAUA | SEQ ID NO: | ACTGAATTTATTG | 0.309 |
| | 1178 | GCCGCACCC | 2358 | AAUUCAGUAG | 3538 | CCGCAC | |

[0074] Furthermore, to screen for a double-stranded nucleic acid having high knockdown activity, the final concentration of the double-stranded nucleic acid was lowered to 10 pM, and the relative expression level of the β2GPI gene was calculated in the same experiment system as the above-mentioned one. The results thereof are shown in Table 2.

TABLE 2

| double-stranded | β2GPI relative |
|---|---|
| nucleic acid | expression |
| number | level |
| AH0075 | 0.206 |
| AH0096 | 0.204 |
| AH0099 | 0.159 |
| AH0119 | 0.170 |
| AH0125 | 0.108 |
| AH0126 | 0.143 |
| AH0133 | 0.202 |
| AH0134 | 0.256 |
| AH0149 | 0.172 |
| AH0152 | 0.114 |
| AH0154 | 0.219 |
| AH0155 | 0.206 |
| AH0181 | 0.240 |
| AH0184 | 0.170 |
| AH0185 | 0.104 |
| AH0187 | 0.117 |
| AH0188 | 0.180 |
| AH0193 | 0.254 |
| AH0236 | 0.127 |
| AH0275 | 0.192 |
| AH0296 | 0.214 |
| AH0324 | 0.255 |
| AH0330 | 0.265 |
| AH0345 | 0.242 |
| AH0371 | 0.167 |
| AH0394 | 0.285 |
| AH0504 | 0.282 |
| AH0528 | 0.197 |
| AH0529 | 0.107 |
| AH0592 | 0.279 |
| AH0689 | 0.178 |
| AH0693 | 0.206 |
| AH0705 | 0.281 |
| AH0712 | 0.149 |
| AH0713 | 0.199 |
| AH0808 | 0.283 |
| AH0821 | 0.257 |
| AH0825 | 0.230 |
| AH0832 | 0.277 |
| AH0876 | 0.246 |
| AH0879 | 0.168 |
| AH0883 | 0.173 |
| AH0887 | 0.243 |
| AH0943 | 0.110 |
| AH1022 | 0.288 |
| AH1025 | 0.218 |
| AH1031 | 0.264 |
| AH1038 | 0.277 |
| AH1039 | 0.212 |
| AH1077 | 0.292 |
| AH1092 | 0.240 |
| AH1095 | 0.282 |
| AH1097 | 0.201 |
| AH1112 | 0.156 |
| AH1116 | 0.291 |
| AH1118 | 0.268 |
| AH1124 | 0.160 |
| AH1125 | 0.215 |
| AH1128 | 0.164 |
| AH1129 | 0.276 |
| AH1137 | 0.288 |
| AH1139 | 0.165 |
| AH1141 | 0.130 |
| AH1142 | 0.078 |
| AH1143 | 0.110 |
| AH1144 | 0.073 |
| AH1145 | 0.091 |
| AH1146 | 0.178 |
| AH1148 | 0.106 |
| AH1149 | 0.110 |

### Example 3 Knockdown Activity of Chemically Modified Double-Stranded Nucleic Acid

[0075] Sense strands consisting of the ribonucleotide sequence shown in SEQ ID NO: 3542-3701, antisense strands consisting of the ribonucleotide sequence shown in SEQ ID NO: 3702-3861 and double-stranded nucleic acids obtained by annealing them (AH1181-AH1340; sense strand shown in SEQ ID NO: n (n=3542-3701) and antisense strand shown in SEQ ID NO: [n+160] form a pair) were synthesized (see Tables 3-1 to 3-5; in the Tables, capitals show non-modified RNAs, and lower-cases show 2′-O-methyl modified RNAs) by Sigma-Aldrich or GeneDesign, Inc. under commitment. The target sequences are as follows: β2GPI partial sequence shown in SEQ ID NO: 2456 for double-stranded nucleic acid numbers AH1181-1204, β2GPI partial sequence shown in SEQ ID NO: 2459 for AH1205-1233, β2GPI partial sequence shown in SEQ ID NO: 2485 for AH1234-1243, β2GPI partial sequence shown in SEQ ID NO: 2486 for AH1244-1253, β2GPI partial sequence shown in SEQ ID NO: 3053 for AH1254-1263, β2GPI partial sequence shown in SEQ ID NO: 3185 for AH1264-1271, β2GPI partial sequence shown in SEQ ID NO: 3239 for AH1272-1282, β2GPI partial sequence shown in SEQ ID NO: 3303 for AH1283-1297, β2GPI partial sequence shown in SEQ ID NO: 3385 for AH1298-1311, β2GPI partial sequence shown in SEQ ID NO: 3398 for AH1312-1316, β2GPI partial sequence shown in SEQ ID NO: 3399 for AH1317-1325, and β2GPI partial sequence shown in SEQ ID NO: 3499 for AH1326-1340.

[0076] These double-stranded nucleic acids were introduced into HepG2 cells by a method similar to Example 2, and the β2GPI mRNA relative expression level was calculated after a lapse of 24 hrs. The results thereof are shown in Tables 3-1 to 3-5.

TABLE 3-1

| double- | | | | | β2GPI | β2GPI |
|---|---|---|---|---|---|---|
| stranded | | | | | relative | relative |
| nucleic | | | | antisense strand | expression | egression |
| acid | | sense strand sequence | | sequence | level | level |
| number | SEQ ID NO: | (5′→3′) | SEQ ID NO: | (5′→3′) | (100 pM) | (10 pM) |
| AH1181 | SEQ ID NO: 3542 | cuGccAuGuuGcuAuuGcAGG | SEQ ID NO: 3702 | UGCAAUAGCAACAUGGCAGAG | 0.097 | 0.36 |
| AH1182 | SEQ ID NO: 3543 | cuGccAuGuuGcuAuuGcAGG | SEQ ID NO: 3703 | UGcAAuAGcAAcAUGGcAGAG | 0.209 | 0.697 |
| AH1183 | SEQ ID NO: 3544 | cuGccAuGuuGcuAuuGcAGG | SEQ ID NO: 3704 | UGcAAuAGcAAcAUGGcAGag | 0.232 | 0.81 |
| AH1184 | SEQ ID NO: 3545 | cuGccAuGuuGcuAuuGcAGG | SEQ ID NO: 3705 | UGcAAuAGcAACAUGGcAGag | 0.245 | 0.65 |
| AH1185 | SEQ ID NO: 3546 | cugccauguugcuauugcagg | SEQ ID NO: 3706 | UGCAAUAGCAACAUGGCAGAG | 0.181 | 0.698 |
| AH1186 | SEQ ID NO: 3547 | cugccauguugcuauugcagg | SEQ ID NO: 3707 | UGcAAuAGcAAcAUGGcAGAG | 0.325 | 0.816 |
| AH1187 | SEQ ID NO: 3548 | cugccauguugcuauugcagg | SEQ ID NO: 3708 | UGcAAuAGGAACAUGGcAGag | 0.176 | 0.747 |
| AH1188 | SEQ ID NO: 3549 | cuGccAuGuuGcuAuuGcAgg | SEQ ID NO: 3709 | UGCAAUAGCAACAUGGCAGAG | 0.059 | 0.269 |
| AH1189 | SEQ ID NO: 3550 | cuGccAuGuuGcuAuuGcAgg | SEQ ID NO: 3710 | UGcAAuAGcAAcAUGGcAGAG | 0.156 | 0.603 |
| AH1190 | SEQ ID NO: 3551 | cuGccAuGuuGcuAuuGcAgg | SEQ ID NO: 3711 | UGcAAuAGcAAcAUGGcAGag | 0.132 | 0.496 |
| AH1191 | SEQ ID NO: 3552 | cuGccAuGuuGcuAuuGcAgg | SEQ ID NO: 3712 | UGcAAuAGcAACAUGGcAGag | 0.101 | 0.447 |
| AH1192 | SEQ ID NO: 3553 | cuGccAuGuuGcuAuuGcAgg | SEQ ID NO: 3713 | uGcAAUAGcAACAuGGcAGag | 0.069 | 0.341 |
| AH1193 | SEQ ID NO: 3554 | CUGccAuGuuGcuAuuGcAGG | SEQ ID NO: 3714 | UGCAAUAGCAACAUGGCAGAG | 0.045 | 0.156 |
| AH1194 | SEQ ID NO: 3555 | CUGccAuGuuGcuAuuGcAGG | SEQ ID NO: 3715 | UGcAAuAGcAAcAUGGcAGAG | 0.098 | 0.373 |
| AH1195 | SEQ ID NO: 3556 | CUGccAuGuuGcuAuuGcAGG | SEQ ID NO: 3716 | UGcAAuAGGAAcAUGGcAGag | 0.131 | 0.434 |
| AH1196 | SEQ ID NO: 3557 | CUGccAuGuuGcuAuuGcAGG | SEQ ID NO: 3717 | UGcAAuAGcAACAUGGcAGag | 0.069 | 0.267 |
| AH1197 | SEQ ID NO: 3558 | CUGccAuGuuGcuAuuGcAgg | SEQ ID NO: 3718 | UGCAAUAGCAACAUGGCAGAG | 0.056 | 0.183 |
| AH1198 | SEQ ID NO: 3559 | CUGccAuGuuGcuAuuGcAgg | SEQ ID NO: 3719 | UGcAAuAGcAAcAUGGcAGAG | 0.104 | 0.403 |
| AH1199 | SEQ ID NO: 3560 | CUGccAuGuuGcuAuuGcAgg | SEQ ID NO: 3720 | UGcAAuAGcAAcAUGGcAGag | 0.119 | 0.338 |
| AH1200 | SEQ ID NO: 3561 | CUGccAuGuuGcuAuuGcAgg | SEQ ID NO: 3721 | UGcAAuAGcAACAUGGcAGag | 0.066 | 0.197 |
| AH1201 | SEQ ID NO: 3562 | CUgcCAuGuuGcuAuuGcAgg | SEQ ID NO: 3722 | UGCAAUAGCAACAUGGCAGAG | 0.042 | 0.137 |
| AH1202 | SEQ ID NO: 3563 | CUgcCAuGuuGcuAuuGcAgg | SEQ ID NO: 3723 | UGcAAuAGcAAcAUGGcAGAG | 0.123 | 0.44 |
| AH1203 | SEQ ID NO: 3564 | CUgcCAuGuuGcuAuuGcAgg | SEQ ID NO: 3724 | UGcAAuAGcAAcAUGGcAGag | 0.11 | 0.429 |
| AH1204 | SEQ ID NO: 3565 | CUgcCAuGuuGcuAuuGcAgg | SEQ ID NO: 3725 | UGcAAuAGcAACAUGGcAGag | 0.062 | 0.727 |
| AH1205 | SEQ ID NO: 3566 | ccAuGuuGcuAuuGcAGGAcG | SEQ ID NO: 3726 | UCCUGCAAUAGCAACAUGGCA | 0.064 | 0.229 |
| AH1206 | SEQ ID NO: 3567 | ccAuGuuGcuAuuGcAGGAcG | SEQ ID NO: 3727 | UCCUGCAAuAGCAAcAUGGcA | 0.049 | 0.188 |
| AH1207 | SEQ ID NO: 3568 | ccAuGuuGcuAuuGcAGGAcG | SEQ ID NO: 3728 | UCCUGCAAuAGCAAcAUGGca | 0.046 | 0.177 |
| AH1208 | SEQ ID NO: 3569 | ccAuGuuGcuAuuGcAGGAcG | SEQ ID NO: 3729 | UCCuGcAAUAGcAACAuGGcA | 0.056 | 0.216 |
| AH1209 | SEQ ID NO: 3570 | ccAuGuuGcuAuuGcAGGAcG | SEQ ID NO: 3730 | UCCuGcAAUAGcAACAuGGca | 0.051 | 0.237 |
| AH1210 | SEQ ID NO: 3571 | ccauguugcuauugcaggacg | SEQ ID NO: 3731 | UCCUGCAAUAGCAACAUGGCA | 0.054 | 0.274 |
| AH1211 | SEQ ID NO: 3572 | ccauguugcuauugcaggacg | SEQ ID NO: 3732 | UCCUGCAAuAGCAAcAUGGcA | 0.064 | 0.267 |
| AH1212 | SEQ ID NO: 3573 | ccauguugcuauugcaggacg | SEQ ID NO: 3733 | UCCUGCAAuAGCAAcAUGGca | 0.064 | 0.279 |
| AH1213 | SEQ ID NO: 3574 | ccauguugcuauugcaggacg | SEQ ID NO: 3734 | UCCuGcAAUAGcAACAuGGcA | 0.062 | 0.282 |
| AH1214 | SEQ ID NO: 3575 | ccauguugcuauugcaggacg | SEQ ID NO: 3735 | UCCuGcAAUAGcAACAuGGca | 0.103 | 0.457 |
| AH1215 | SEQ ID NO: 3576 | ccAuGuuGcuAuuGcAGGAcg | SEQ ID NO: 3736 | UCCUGCAAUAGCAACAUGGCA | 0.065 | 0.22 |
| AH1216 | SEQ ID NO: 3577 | ccAuGuuGcuAuuGcAGGAcg | SEQ ID NO: 3737 | UCCUGCAAuAGCAAcAUGGcA | 0.055 | 0.163 |

TABLE 3-2

| double- | | | | | β2GPI | β2GPI |
|---|---|---|---|---|---|---|
| stranded | | | | | relative | relative |
| nucleic | | | | antisense strand | expression | expression |
| acid | | sense strand sequence | | sequence | level | level |
| number | SEQ ID NO: | (5′->3′) | SEQ ID NO: | (5′->3′) | (100 pM) | (10 pM) |
| AH1217 | SEQ ID NO: 3578 | ccAuGuuGcuAuuGcAGGAcg | SEQ ID NO: 3738 | UCCUGCAAuAGCAAcAUGGca | 0.051 | 0.21 |
| AH1218 | SEQ ID NO: 3579 | ccAuGuuGcuAuuGcAGGAcg | SEQ ID NO: 3739 | UCCuGcAAUAGcAACAuGGcA | 0.037 | 0.171 |
| AH1219 | SEQ ID NO: 3580 | ccAuGuuGcuAuuGcAGGAcg | SEQ ID NO: 3740 | UCCuGcAAUAGcAACAuGGca | 0.051 | 0.224 |
| AH1220 | SEQ ID NO: 3581 | ccauguugcuauugcaggacg | SEQ ID NO: 3741 | UCCUGCAAuAGCAAcAuGGca | 0.044 | 0.143 |
| AH1221 | SEQ ID NO: 3582 | ccauguugcuauugcaggacg | SEQ ID NO: 3742 | UCCuGcAAuAGCAAcAUGGca | 0.058 | 0.177 |
| AH1222 | SEQ ID NO: 3583 | ccauguugcuauugcaggacg | SEQ ID NO: 3743 | UCCuGcAAuAGcAAcAUGGca | 0.056 | 0.173 |
| AH1223 | SEQ ID NO: 3584 | ccauguugcuauugcaggacg | SEQ ID NO: 3744 | UCCuGcAAuAGcAAcAuGGca | 0.047 | 0.185 |
| AH1224 | SEQ ID NO: 3585 | ccauguugcuauugcaggacg | SEQ ID NO: 3745 | UCCUGCAAuAGCAAcAUgGca | 0.048 | 0.145 |
| AH1225 | SEQ ID NO: 3586 | ccauguugcuauugcaggacg | SEQ ID NO: 3746 | UCCuGcAAuAGcAAcAUgGca | 0.057 | 0.143 |
| AH1226 | SEQ ID NO: 3587 | ccauguugcuauugcaggacg | SEQ ID NO: 3747 | UCcUgCAAuAGcAAcAUgGca | 0.081 | 0.23 |
| AH1227 | SEQ ID NO: 3588 | ccAuGuuGcuAuuGcAGGAcg | SEQ ID NO: 3748 | UCCUGCAAuAGCAAcAuGGca | 0.052 | 0.114 |
| AH1228 | SEQ ID NO: 3589 | ccAuGuuGcuAuuGcAGGAcg | SEQ ID NO: 3749 | UCCuGcAAuAGCAAcAUGGca | 0.052 | 0.142 |
| AH1229 | SEQ ID NO: 3590 | ccAuGuuGcuAuuGcAGGAcg | SEQ ID NO: 3750 | UCCuGcAAuAGcAAcAUGGca | 0.046 | 0.139 |
| AH1230 | SEQ ID NO: 3591 | ccAuGuuGcuAuuGcAGGAcg | SEQ ID NO: 3751 | UCCuGcAAuAGcAAcAuGGca | 0.045 | 0.136 |
| AH1231 | SEQ ID NO: 3592 | ccAuGuuGcuAuuGcAGGAcg | SEQ ID NO: 3752 | UCCUGCAAuAGCAAcAUgGca | 0.047 | 0.106 |
| AH1232 | SEQ ID NO: 3593 | ccAuGuuGcuAuuGcAGGAcg | SEQ ID NO: 3753 | UCCuGcAAuAGcAAcAUgGca | 0.04 | 0.094 |
| AH1233 | SEQ ID NO: 3594 | ccAuGuuGcuAuuGcAGGAcg | SEQ ID NO: 3754 | UCcUgCAAuAGcAAcAUgGca | 0.051 | 0.123 |
| AH1234 | SEQ ID NO: 3595 | GucccAAGccAGAuGAuuuAc | SEQ ID NO: 3755 | AAAUCAUCUGGCUUGGGACAG | 0.078 | 0.336 |
| AH1235 | SEQ ID NO: 3596 | GucccAAGccAGAuGAuuuAc | SEQ ID NO: 3756 | AAAUcAUCUGGCUUGGGAcAG | 0.137 | 0.622 |
| AH1236 | SEQ ID NO: 3597 | GucccAAGccAGAuGAuuuAc | SEQ ID NO: 3757 | AAAUcAUCUGGCUUGGGAcag | 0.081 | 0.425 |
| AH1237 | SEQ ID NO: 3598 | GucccAAGccAGAuGAuuuAc | SEQ ID NO: 3758 | AAAUCAUCuGGcUuGGGACag | 0.237 | 0.836 |
| AH1238 | SEQ ID NO: 3599 | gucccaagccagaugauuuac | SEQ ID NO: 3759 | AAAUCAUCUGGCUUGGGACAG | 0.243 | 0.768 |
| AH1239 | SEQ ID NO: 3600 | GucccAAGccAGAuGAuuuac | SEQ ID NO: 3760 | AAAUCAUCUGGCUUGGGACAG | 0.072 | 0.312 |
| AH1240 | SEQ ID NO: 3601 | GucccAAGccAGAuGAuuuac | SEQ ID NO: 3761 | AAAUcAUCUGGCUUGGGAcAG | 0.16 | 0.72 |
| AH1241 | SEQ ID NO: 3602 | GucccAAGccAGAuGAuuuac | SEQ ID NO: 3762 | AAAUcAUCUGGCUUGGGAcag | 0.091 | 0.398 |
| AH1242 | SEQ ID NO: 3603 | GucccAAGccAGAuGAuuuac | SEQ ID NO: 3763 | AAAUCAUCuGGcUuGGGACAG | 0.29 | 0.846 |
| AH1243 | SEQ ID NO: 3604 | GucccAAGccAGAuGAuuuac | SEQ ID NO: 3764 | AAAUCAUCuGGcUuGGGACag | 0.216 | 0.686 |
| AH1244 | SEQ ID NO: 3605 | ucccAAGccAGAuGAuuuAcc | SEQ ID NO: 3765 | UAAAUCAUCUGGCUUGGGACA | 0.053 | 0.188 |
| AH1245 | SEQ ID NO: 3606 | ucccAAGccAGAuGAuuuAcc | SEQ ID NO: 3766 | uAAAUcAUCUGGCUUGGGAcA | 0.06 | 0.176 |
| AH1246 | SEQ ID NO: 3607 | ucccAAGccAGAuGAuuuAcc | SEQ ID NO: 3767 | uAAAUcAUCUGGCUUGGGAca | 0.049 | 0.181 |
| AH1247 | SEQ ID NO: 3608 | ucccAAGccAGAuGAuuuAcc | SEQ ID NO: 3768 | UAAAUCAUCuGGcUuGGGACA | 0.079 | 0.171 |
| AH1248 | SEQ ID NO: 3609 | ucccAAGccAGAuGAuuuAcc | SEQ ID NO: 3769 | UAAAUCAUCuGGcUuGGGAca | 0.04 | 0.151 |
| AH1249 | SEQ ID NO: 3610 | ucccaagccagaugauuuacc | SEQ ID NO: 3770 | UAAAUCAUCUGGCUUGGGACA | 0.05 | 0.199 |
| AH1250 | SEQ ID NO: 3611 | ucccaagccagaugauuuacc | SEQ ID NO: 3771 | uAAAUcAUCUGGCUUGGGAcA | 0.121 | 0.263 |
| AH1251 | SEQ ID NO: 3612 | ucccaagccagaugauuuacc | SEQ ID NO: 3772 | uAAAUcAUCUGGCUUGGGAca | 0.061 | 0.31 |
| AH1252 | SEQ ID NO: 3613 | ucccaagccagaugauuuacc | SEQ ID NO: 3773 | UAAAUCAUCuGGcUuGGGACA | 0.074 | 0.271 |

TABLE 3-3

| | | | | | β2GPI | β2GPI |
|---|---|---|---|---|---|---|
| double- | | | | | relative | relative |
| stranded | | | | | expression | expression |
| nudeic acid | | sense strand sequence | | antisense strand sequence | level | level |
| number | SEQ ID NO: | (5′→3′) | SEQ ID NO: | (5′→3) | (100 pM) | (10 pM) |
| AH1253 | SEQ ID NO: 3614 | ucccaagccagaugauuuacc | SEQ ID NO: 3774 | UAAAUCAUCuGGcUuGGGAca | 0.07 | 0.308 |
| AH1254 | SEQ ID NO: 3615 | cAAuGGAuuuGuGAAcuAucc | SEQ ID NO: 3775 | AUAGUUCACAAAUCCAUUGUC | 0.066 | 0.231 |
| AH1255 | SEQ ID NO: 3616 | cAAuGGAuuuGuGAAcuAucc | SEQ ID NO: 3616 | AuAGUUcAcAAAUCcAUUGUC | 0.08 | 0.356 |
| AH1256 | SEQ ID NO: 3617 | cAAuGGAuuuGuGAAcuAucc | SEQ ID NO: 3777 | AuAGUUcAcAAAUCcAUUGuc | 0.068 | 0.227 |
| AH1257 | SEQ ID NO: 3618 | cAAuGGAuuuGuGAAcuAucc | SEQ ID NO: 3778 | AUAGuUCACAAAUCCAUuGuC | 0.13 | 0.28 |
| AH1258 | SEQ ID NO: 3619 | cAAuGGAuuuGuGAAcuAucc | SEQ ID NO: 3779 | AUAGuUCACAAAUCCAUuGuc | 0.081 | 0.262 |
| AH1259 | SEQ ID NO: 3620 | caauggauuugugaacuaucc | SEQ ID NO: 3780 | AUAGUUCACAAAUCCAUUGUC | 0.074 | 0.241 |
| AH1260 | SEQ ID NO: 3621 | caauggauuugugaacuaucc | SEQ ID NO: 3781 | AuAGUUcAcAAAUCcAUUGUC | 0.173 | 0.564 |
| AH1261 | SEQ ID NO: 3622 | caauggauuugugaacuaucc | SEQ ID NO: 3782 | AuAGUUcAcAAAUCcAUUGuc | 0.133 | 0A55 |
| AH1262 | SEQ ID NO: 3623 | caauggauuugugaacuaucc | SEQ ID NO: 3783 | AUAGuUCACAAAUCCAUuGuC | 0.087 | 0.336 |
| AH1263 | SEQ ID NO: 3624 | caauggauuugugaacuaucc | SEQ ID NO: 3784 | AUAGuUCACAAAUCCAUuGuc | 0.087 | 0.289 |
| AH1264 | SEQ ID NO: 3625 | cAuGccAAGuuGuAAAGcAuc | SEQ ID NO: 3785 | UGCUUUACAACUUGGCAUGGC | 0.06 | 0.216 |
| AH1265 | SEQ ID NO: 3626 | cAuGccAAGuuGuAAAGcAuc | SEQ ID NO: 3786 | UGCUUuAcAACUUGGcAUGGC | 0.065 | 0.194 |
| AH1266 | SEQ ID NO: 3627 | cAuGccAAGuuGuAAAGcAuc | SEQ ID NO: 3787 | UGCUUuAcAACUUGGcAUGgc | 0.049 | 0.193 |
| AH1267 | SEQ ID NO: 3628 | cAuGccAAGuuGuAAAGcAuc | SEQ ID NO: 3788 | uGcUUUACAACUuGGcAuGGc | 0.303 | 0.648 |
| AH1268 | SEQ ID NO: 3629 | cAuGccAAGuuGuAAAGcAuc | SEQ ID NO: 3789 | uGcUUUACAACUuGGcAuGgc | 0.338 | 0.75 |
| AH1269 | SEQ ID NO: 3630 | caugccaaguuguaaagcauc | SEQ ID NO: 3790 | UGCUUUACAACUUGGCAUGGC | 0.106 | 0.356 |
| AH1270 | SEQ ID NO: 3631 | caugccaaguuguaaagcauc | SEQ ID NO: 3791 | UGCUUuAcAACUUGGcAUGGC | 0.132 | 0.449 |
| AH1271 | SEQ ID NO: 3632 | caugccaaguuguaaagcauc | SEQ ID NO: 3792 | UGCUUuAcAACUUGGcAUGgc | 0.173 | 0.569 |
| AH1272 | SEQ ID NO: 3633 | GuAccAAGGAGAGAGAGuAAA | SEQ ID NO: 3793 | UACUCUCUCUCCUUGGUACAC | 0.053 | 0.227 |
| AH1273 | SEQ ID NO: 3634 | GuAccAAGGAGAGAGAGuAAA | SEQ ID NO: 3794 | uACUCUCUCUCCUUGGuAcAC | 0.151 | 0.603 |
| AH1274 | SEQ ID NO: 3635 | GuAccAAGGAGAGAGAGuAAA | SEQ ID NO: 3795 | uACUCUCUCUCCUUGGuAcac | 0.16 | 0.711 |
| AH1275 | SEQ ID NO: 3636 | GuAccAAGGAGAGAGAGuAAA | SEQ ID NO: 3796 | UACUCUCUCUCCUuGGuACAC | 0.121 | 0.538 |
| AH1276 | SEQ ID NO: 3637 | GuAccAAGGAGAGAGAGuAAA | SEQ ID NO: 3797 | UACUCUCUCUCCUuGGuACac | 0.112 | 0.413 |
| AH1277 | SEQ ID NO: 3638 | guaccaaggagagagaguaaa | SEQ ID NO: 3798 | UACUCUCUCUCCUUGGUACAC | 0.238 | 0.648 |
| AH1278 | SEQ ID NO: 3639 | GuAccAAGGAGAGAGAGuAaa | SEQ ID NO: 3799 | UACUCUCUCUCCUUGGUACAC | 0D71 | 0.184 |
| AH1279 | SEQ ID NO: 3640 | GuAccAAGGAGAGAGAGuAaa | SEQ ID NO: 3800 | uACUCUCUCUCCUUGGuAcAC | 0.193 | 0.605 |
| AH1280 | SEQ ID NO: 3641 | GuAccAAGGAGAGAGAGuAaa | SEQ ID NO: 3801 | uACUCUCUCUCCUUGGuAcac | 0.245 | 0.705 |
| AH1281 | SEQ ID NO: 3642 | GuAccAAGGAGAGAGAGuAaa | SEQ ID NO: 3802 | UACUCUCUCUCCUuGGuACAC | 0.104 | 0.412 |
| AH1282 | SEQ ID NO: 3643 | GuAccAAGGAGAGAGAGuAaa | SEQ ID NO: 3803 | UACUCUCUCUCCUuGGuACac | 0.096 | 0.391 |
| AH1283 | SEQ ID NO: 3644 | GuuucuuucuucuGcAAAAAu | SEQ ID NO: 3804 | UUUUGCAGAAGAAAGAAACUU | 0.055 | 0.129 |
| AH1284 | SEQ ID NO: 3645 | GuuucuuucuucuGcAAAAAu | SEQ ID NO: 3805 | UUUUGcAGAAGAAAGAAACUU | 0.045 | 0.153 |
| AH1285 | SEQ ID NO: 3646 | GuuucuuucuucuGcAAAAAu | SEQ ID NO: 3806 | UUUUGcAGAAGAAAGAAACuu | 0.043 | 0.167 |
| AH1286 | SEQ ID NO: 3647 | GuuucuuucuucuGcAAAAAu | SEQ ID NO: 3807 | UUUuGcAGAAGAAAGAAACUU | 0.044 | 0.194 |
| AH1287 | SEQ ID NO: 3648 | GuuucuuucuucuGcAAAAAu | SEQ ID NO: 3808 | UUUuGcAGAAGAAAGAAACuu | 0.046 | 0.205 |
| AH1288 | SEQ ID NO: 3649 | guuucuuucuucugcaaaaau | SEQ ID NO: 3809 | UUUUGCAGAAGAAAGAAACUU | 0.05 | 0.299 |

TABLE 3-4

| | | | | | β2GPI | β2GPI |
|---|---|---|---|---|---|---|
| double- | | | | | relative | relative |
| stranded | | | | | expression | expression |
| nucleic acid | | sense strand sequence | | antisense strand sequence | level | level |
| number | SEQ ID NO: | (5′→3) | SEQ ID NO: | (5′→3′) | (100 pM) | (10 pM) |
| AH1289 | SEQ ID NO: 3650 | guuucuuucuucugcaaaaau | SEQ ID NO: 3810 | UUUUGcAGAAGAAAGAAACUU | 0.059 | 0.216 |
| AH1290 | SEQ ID NO: 3651 | guuucuuucuucugcaaaaau | SEQ ID NO: 3811 | UUUUGcAGAAGAAAGAAACuu | 0.048 | 0.223 |
| AH1291 | SEQ ID NO: 3652 | guuucuuucuucugcaaaaau | SEQ ID NO: 3812 | UUUuGcAGAAGAAAGAAACUU | 0.041 | 0.155 |
| AH1292 | SEQ ID NO: 3653 | guuucuuucuucugcaaaaau | SEQ ID NO: 3813 | UUUuGcAGAAGAAAGAAACuu | 0.038 | 0.165 |
| AH1293 | SEQ ID NO: 3654 | GuuucuuucuucuGcAAAAau | SEQ ID NO: 3814 | UUUUGCAGAAGAAAGAAACUU | 0.03 | 0.153 |
| AH1294 | SEQ ID NO: 3655 | GuuucuuucuucuGcAAAAau | SEQ ID NO: 3815 | UUUUGcAGAAGAAAGAAACUU | 0.037 | 0.158 |
| AH1295 | SEQ ID NO: 3656 | GuuucuuucuucuGcAAAAau | SEQ ID NO: 3816 | UUUUGcAGAAGAAAGAAACuu | 0.045 | 0.164 |
| AH1296 | SEQ ID NO: 3657 | GuuucuuucuucuGcAAAAau | SEQ ID NO: 3817 | UUUuGcAGAAGAAAGAAACUU | 0.031 | 0.116 |
| AH1297 | SEQ ID NO: 3658 | GuuucuuucuucuGcAAAAau | SEQ ID NO: 3818 | UUUuGcAGAAGAAAGAAACuu | 0.037 | 0.191 |
| AH1298 | SEQ ID NO: 3659 | ccAAAuGCuucAAGGAAcAcA | SEQ ID NO: 3819 | UGUUCCUUGAAGCAUUUGGGG | 0.058 | 0.177 |
| AH1299 | SEQ ID NO: 3660 | ccAAAuGCuucAAGGAAcAcA | SEQ ID NO: 3820 | UGUUCCUUGAAGCAUUUGGGG | 0.051 | 0.184 |
| AH1300 | SEQ ID NO: 3661 | ccAAAuGCuucAAGGAAcAcA | SEQ ID NO: 3821 | UGUUCCUUGAAGcAUUUGGgg | 0.052 | 0.138 |
| AH1301 | SEQ ID NO: 3662 | ccAAAuGCuucAAGGAAcAcA | SEQ ID NO: 3822 | uGuUCCUuGAAGcAUUuGGGG | 0.447 | 0.697 |
| AH1302 | SEQ ID NO: 3663 | ccAAAuGCuucAAGGAAcAcA | SEQ ID NO: 3823 | uGuUCCUuGAAGcAUUuGGgg | 0.244 | 0.548 |
| AH1303 | SEQ ID NO: 3664 | ccaaaugcuucaaggaacaca | SEQ ID NO: 3824 | UGUUCCUUGAAGCAUUUGGGG | 0.113 | 0.322 |
| AH1304 | SEQ ID NO: 3665 | ccaaaugcuucaaggaacaca | SEQ ID NO: 3825 | UGUUCCUUGAAGCAUUUGGGG | 0.116 | 0.393 |
| AH1305 | SEQ ID NO: 3666 | ccaaaugcuucaaggaacaca | SEQ ID NO: 3826 | UGUUCCUUGAAGcAUUUGGgg | 0.055 | 0.242 |
| AH1306 | SEQ ID NO: 3667 | ccaaaugcuucaaggaacaca | SEQ ID NO: 3827 | uGuUCCUuGAAGcAUUuGGGG | 0.676 | 0.793 |
| AH1307 | SEQ ID NO: 3668 | ccaaaugcuucaaggaacaca | SEQ ID NO: 3828 | uGuUCCUuGAAGcAUUuGGgg | 0.454 | 0.851 |
| AH1308 | SEQ ID NO: 3669 | ccAAAuGCuucAAGGAAcAca | SEQ ID NO: 3829 | UGUUCCUUGAAGCAUUUGGGG | 0.055 | 0.198 |
| AH1309 | SEQ ID NO: 3670 | ccAAAuGCuucAAGGAAcAca | SEQ ID NO: 3830 | UGUUCCUUGAAGCAUUUGGGG | 0.058 | 0.214 |
| AH1310 | SEQ ID NO: 3671 | ccAAAuGCuucAAGGAAcAca | SEQ ID NO: 3831 | UGUUCCUUGAAGcAUUUGGgg | 0.039 | 0.152 |
| AH1311 | SEQ ID NO: 3672 | ccAAAuGCuucAAGGAAcAca | SEQ ID NO: 3832 | uGuUCCUuGAAGcAUUuGGgg | 0.196 | 0.702 |
| AH1312 | SEQ ID NO: 3673 | GGAAcAcAGuucucuGGcuuu | SEQ ID NO: 3833 | AGCCAGAGAACUGUGUUCCUU | 0.094 | 0.501 |
| AH1313 | SEQ ID NO: 3674 | GGAAcAcAGuucucuGGcuuu | SEQ ID NO: 3834 | AGCcAGAGAACUGUGUUCCUU | 0.063 | 0.367 |
| AH1314 | SEQ ID NO: 3675 | GGAAcAcAGuucucuGGcuuu | SEQ ID NO: 3835 | AGCcAGAGAACUGUGUUCCuu | 0.249 | 0.79 |
| AH1315 | SEQ ID NO: 3676 | ggaacacaguucucuggcuuu | SEQ ID NO: 3836 | AGCCAGAGAACUGUGUUCCUU | 0.191 | 0.753 |
| AH1316 | SEQ ID NO: 3677 | ggaacacaguucucuggcuuu | SEQ ID NO: 3837 | AGCcAGAGAACUGUGUUCCUU | 0.098 | 0.433 |
| AH1317 | SEQ ID NO: 3678 | GAAcAcAGuucucuGGCuuuu | SEQ ID NO: 3838 | AAGCCAGAGAACUGUGUUCCU | 0.057 | 0.238 |
| AH1318 | SEQ ID NO: 3679 | GAAcAcAGuucucuGGCuuuu | SEQ ID NO: 3839 | AAGCcAGAGAACUGUGUUCCU | 0.069 | 0.323 |
| AH1319 | SEQ ID NO: 3680 | GAAcAcAGuucucuGGCuuuu | SEQ ID NO: 3840 | AAGCcAGAGAACUGUGUUCcu | 0.113 | 0.496 |
| AH1320 | SEQ ID NO: 3681 | GAAcAcAGuucucuGGCuuuu | SEQ ID NO: 3841 | AAGGCAGAGAACuGuGuUCCU | 0.06 | 0.287 |
| AH1321 | SEQ ID NO: 3682 | GAAcAcAGuucucuGGCuuuu | SEQ ID NO: 3842 | AAGcCAGAGAACuGuGuUCcu | 0.081 | 0.327 |
| AH1322 | SEQ ID NO: 3683 | gaacacaguucucuggcuuuu | SEQ ID NO: 3843 | AAGCcAGAGAACUGUGUUCCU | 0.086 | 0.369 |
| AH1323 | SEQ ID NO: 3684 | gaacacaguucucuggcuuuu | SEQ ID NO: 3844 | AAGCcAGAGAACUGUGUUCcu | 0.14 | 0.541 |
| AH1324 | SEQ ID NO: 3685 | gaacacaguucucuggcuuuu | SEQ ID NO: 3845 | AAGcCAGAGAACuGuGuUCCU | 0.053 | 0.259 |

TABLE 3-5

| double- | | | | | β2GPI | β2GPI |
|---|---|---|---|---|---|---|
| stranded | | | | | relative | relative |
| nucleic | | | | antisense strand | expression | expression |
| acid | | sense strand sequence | | sequence | level | level |
| number | SEQ ID NO: | (5′→3) | SEQ ID NO: | (5′→3′) | (100 pM) | (10 pM) |
| AH1325 | SEQ ID NO: | gaacacaguucucuggcuuuu | SEQ ID NO: | AAGcCAGAGAACuGuGu | 0.059 | 0.268 |
| | 3686 | | 3846 | UCcu | | |
| AH1326 | SEQ ID NO: | uucAuccAAGGAAccuAAuuG | SEQ ID NO: | AUUAGGUUCCUUGGAUG | 0.063 | 0.159 |
| | 3687 | | 3847 | AACA | | |
| AH1327 | SEQ ID NO: | uucAuccAAGGAAccuAAuuG | SEQ ID NO: | AUuAGGUUCCUUGGAUG | 0.054 | 0.145 |
| | 3688 | | 3848 | AAcA | | |
| AH1328 | SEQ ID NO: | uucAuccAAGGAAccuAAuuG | SEQ ID NO: | AUuAGGUUCCUUGGAUG | 0.049 | 0.165 |
| | 3689 | | 3849 | AAca | | |
| AH1329 | SEQ ID NO: | uucAuccAAGGAAccuAAuuG | SEQ ID NO: | AUUAGGuUCCUuGGAuG | 0.092 | 0.317 |
| | 3690 | | 3850 | AACA | | |
| AH1330 | SEQ ID NO: | uucAuccAAGGAAccuAAuuG | SEQ ID NO: | AUUAGGuUCCUuGGAuG | 0.101 | 0.282 |
| | 3691 | | 3851 | AAca | | |
| AH1331 | SEQ ID NO: | uucauccaaggaaccuaauug | SEQ ID NO: | AUUAGGUUCCUUGGAUG | 0.057 | 0.18 |
| | 3692 | | 3852 | AACA | | |
| AH1332 | SEQ ID NO: | uucauccaaggaaccuaauug | SEQ ID NO: | AUuAGGUUCCUUGGAUG | 0.055 | 0.175 |
| | 3693 | | 3853 | AAcA | | |
| AH1333 | SEQ ID NO: | uucauccaaggaaccuaauug | SEQ ID NO: | AUuAGGUUCCUUGGAUG | 0.05 | 0.164 |
| | 3694 | | 3854 | AAca | | |
| AH1334 | SEQ ID NO: | uucauccaaggaaccuaauug | SEQ ID NO: | AUUAGGuUCCUuGGAuG | 0.121 | 0.393 |
| | 3695 | | 3855 | AACA | | |
| AH1335 | SEQ ID NO: | uucauccaaggaaccuaauug | SEQ ID NO: | AUUAGGuUCCUuGGAuG | 0.105 | 0.369 |
| | 3696 | | 3856 | AAca | | |
| AH1336 | SEQ ID NO: | uucAuccAAGGAAccuAAuug | SEQ ID NO: | AUUAGGUUCCUUGGAUG | 0.077 | 0.16 |
| | 3697 | | 3857 | AACA | | |
| AH1337 | SEQ ID NO: | uucAuccAAGGAAccuAAuug | SEQ ID NO: | AUuAGGUUCCUUGGAUG | 0.051 | 0.156 |
| | 3698 | | 3858 | AAcA | | |
| AH1338 | SEQ ID NO: | uucAuccAAGGAAccuAAuug | SEQ ID NO: | AUuAGGUUCCUUGGAUG | 0.047 | 0.187 |
| | 3699 | | 3859 | AAca | | |
| AH1339 | SEQ ID NO: | uucAuccAAGGAAccuAAuug | SEQ ID NO: | AUUAGGuUCCUuGGAuG | 0.102 | 0.359 |
| | 3700 | | 3860 | AACA | | |
| AH1340 | SEQ ID NO: | uucAuccAAGGAAccuAAuug | SEQ ID NO: | AUUAGGuUCCUuGGAuG | 0.097 | 0.373 |
| | 3701 | | 3861 | AAca | | |

[0077] This application is based on a patent application No. 2014-7305 filed in Japan (filing date: Jan. 17, 2014), the contents of which are incorporated in full herein.

[0078] The present invention provides a nucleic acid having activity to suppress expression of β2GPI, a pharmaceutical composition comprising the nucleic acid as an active ingredient, and the like. The nucleic acid and pharmaceutical composition of the present invention suppress expression of β2GPI, and are useful for the treatment or prophylaxis of autoimmune diseases such as APS, SLE and the like and thrombosis in hemodialysis.

The application's sequence listing, which the Patent Office published only in electronic form, follows.

SEQUENCE LISTING (3861 sequences)

SEQ ID NO: 1 - RNA, 21 nt, Artificial Sequence
  Synthetic siRNA sense strand against b2GPI
cucugucuuuuuagcagacga

SEQ ID NO: 2 - RNA, 21 nt, Artificial Seqence
  Synthetic siRNA sense strand against b2GPI
ucugucuuuuuagcagacgaa

SEQ ID NO: 3 - RNA, 21 nt, Artificial Seqence
  Synthetic siRNA sense strand against b2GPI
cugucuuuuuagcagacgaaa

SEQ ID NO: 4 - RNA, 21 nt, Artificial Seqence
  Synthetic siRNA sense strand against b2GPI
ugucuuuuuagcagacgaaaa

SEQ ID NO: 5 - RNA, 21 nt, Artificial Seqence
  Synthetic siRNA sense strand against b2GPI
gucuuuuuagcagacgaaaac

SEQ ID NO: 6 - RNA, 21 nt, Artificial Seqence
  Synthetic siRNA sense strand against b2GPI
ucuuuuuagcagacgaaaacc

SEQ ID NO: 7 - RNA, 21 nt, Artificial Seqence
  Synthetic siRNA sense strand against b2GPI
cuuuuuagcagacgaaaacca

SEQ ID NO: 8 - RNA, 21 nt, Artificial Seqence
  Synthetic siRNA sense strand against b2GPI
uuuuuagcagacgaaaaccac

SEQ ID NO: 9 - RNA, 21 nt, Artificial Seqence
  Synthetic siRNA sense strand against b2GPI
uuuuagcagacgaaaaccacu

SEQ ID NO: 10 - RNA, 21 nt, Artificial Seqence
  Synthetic siRNA sense strand against b2GPI
uuuagcagacgaaaaccacuu

SEQ ID NO: 11 - RNA, 21 nt, Artificial Seqence
  Synthetic siRNA sense strand against b2GPI
uuagcagacgaaaaccacuuu

SEQ ID NO: 12 - RNA, 21 nt, Artificial Seqence
  Synthetic siRNA sense strand against b2GPI
uagcagacgaaaaccacuuug

SEQ ID NO: 13 - RNA, 21 nt, Artificial Seqence
  Synthetic siRNA sense strand against b2GPI
agcagacgaaaaccacuuugg

SEQ ID NO: 14 - RNA, 21 nt, Artificial Seqence
  Synthetic siRNA sense strand against b2GPI
gcagacgaaaaccacuuuggu

SEQ ID NO: 15 - RNA, 21 nt, Artificial Seqence
  Synthetic siRNA sense strand against b2GPI
cagacgaaaaccacuuuggua

SEQ ID NO: 16 - RNA, 21 nt, Artificial Seqence
  Synthetic siRNA sense strand against b2GPI
agacgaaaaccacuuugguag

SEQ ID NO: 17 - RNA, 21 nt, Artificial Seqence
  Synthetic siRNA sense strand against b2GPI
gacgaaaaccacuuugguagu

SEQ ID NO: 18 - RNA, 21 nt, Artificial Seqence
  Synthetic siRNA sense strand against b2GPI
acgaaaaccacuuugguagug

SEQ ID NO: 19 - RNA, 21 nt, Artificial Seqence
  Synthetic siRNA sense strand against b2GPI
cgaaaaccacuuugguagugc

SEQ ID NO: 20 - RNA, 21 nt, Artificial Seqence
  Synthetic siRNA sense strand against b2GPI
gaaaaccacuuugguagugcc

SEQ ID NO: 21 - RNA, 21 nt, Artificial Seqence
  Synthetic siRNA sense strand against b2GPI
aaaaccacuuugguagugcca

SEQ ID NO: 22 - RNA, 21 nt, Artificial Seqence
  Synthetic siRNA sense strand against b2GPI
aaaccacuuugguagugccag

SEQ ID NO: 23 - RNA, 21 nt, Artificial Seqence
  Synthetic siRNA sense strand against b2GPI
aaccacuuugguagugccagu

SEQ ID NO: 24 - RNA, 21 nt, Artificial Seqence
  Synthetic siRNA sense strand against b2GPI
accacuuugguagugccagug

SEQ ID NO: 25 - RNA, 21 nt, Artificial Seqence
  Synthetic siRNA sense strand against b2GPI
ccacuuugguagugccagugu

SEQ ID NO: 26 - RNA, 21 nt, Artificial Seqence
  Synthetic siRNA sense strand against b2GPI
cacuuugguagugccagugug

SEQ ID NO: 27 - RNA, 21 nt, Artificial Seqence
  Synthetic siRNA sense strand against b2GPI
acuuugguagugccaguguga

SEQ ID NO: 28 - RNA, 21 nt, Artificial Seqence
  Synthetic siRNA sense strand against b2GPI
cuuugguagugccagugugac

SEQ ID NO: 29 - RNA, 21 nt, Artificial Seqence
  Synthetic siRNA sense strand against b2GPI
uuugguagugccagugugacu

SEQ ID NO: 30 - RNA, 21 nt, Artificial Seqence
  Synthetic siRNA sense strand against b2GPI
uugguagugccagugugacuc

SEQ ID NO: 31 - RNA, 21 nt, Artificial Seqence
  Synthetic siRNA sense strand against b2GPI
ugguagugccagugugacuca

SEQ ID NO: 32 - RNA, 21 nt, Artificial Seqence
  Synthetic siRNA sense strand against b2GPI
gguagugccagugugacucau

SEQ ID NO: 33 - RNA, 21 nt, Artificial Seqence
  Synthetic siRNA sense strand against b2GPI
guagugccagugugacucauc

SEQ ID NO: 34 - RNA, 21 nt, Artificial Seqence
  Synthetic siRNA sense strand against b2GPI
uagugccagugugacucaucc

SEQ ID NO: 35 - RNA, 21 nt, Artificial Seqence
  Synthetic siRNA sense strand against b2GPI
agugccagugugacucaucca

SEQ ID NO: 36 - RNA, 21 nt, Artificial Seqence
  Synthetic siRNA sense strand against b2GPI
gugccagugugacucauccac

SEQ ID NO: 37 - RNA, 21 nt, Artificial Seqence
  Synthetic siRNA sense strand against b2GPI
ugccagugugacucauccaca

SEQ ID NO: 38 - RNA, 21 nt, Artificial Seqence
  Synthetic siRNA sense strand against b2GPI
gccagugugacucauccacaa

SEQ ID NO: 39 - RNA, 21 nt, Artificial Seqence
  Synthetic siRNA sense strand against b2GPI
ccagugugacucauccacaau

SEQ ID NO: 40 - RNA, 21 nt, Artificial Seqence
  Synthetic siRNA sense strand against b2GPI
cagugugacucauccacaaug

SEQ ID NO: 41 - RNA, 21 nt, Artificial Seqence
  Synthetic siRNA sense strand against b2GPI
agugugacucauccacaauga

SEQ ID NO: 42 - RNA, 21 nt, Artificial Seqence
  Synthetic siRNA sense strand against b2GPI
gugugacucauccacaaugau

SEQ ID NO: 43 - RNA, 21 nt, Artificial Seqence
  Synthetic siRNA sense strand against b2GPI
ugugacucauccacaaugauu

SEQ ID NO: 44 - RNA, 21 nt, Artificial Seqence
  Synthetic siRNA sense strand against b2GPI
gugacucauccacaaugauuu

SEQ ID NO: 45 - RNA, 21 nt, Artificial Seqence
  Synthetic siRNA sense strand against b2GPI
ugacucauccacaaugauuuc

SEQ ID NO: 46 - RNA, 21 nt, Artificial Seqence
  Synthetic siRNA sense strand against b2GPI
gacucauccacaaugauuucu

SEQ ID NO: 47 - RNA, 21 nt, Artificial Seqence
  Synthetic siRNA sense strand against b2GPI
acucauccacaaugauuucuc

SEQ ID NO: 48 - RNA, 21 nt, Artificial Seqence
  Synthetic siRNA sense strand against b2GPI
cucauccacaaugauuucucc

SEQ ID NO: 49 - RNA, 21 nt, Artificial Seqence
  Synthetic siRNA sense strand against b2GPI
ucauccacaaugauuucucca

SEQ ID NO: 50 - RNA, 21 nt, Artificial Seqence
  Synthetic siRNA sense strand against b2GPI
cauccacaaugauuucuccag

SEQ ID NO: 51 - RNA, 21 nt, Artificial Seqence
  Synthetic siRNA sense strand against b2GPI
auccacaaugauuucuccagu

SEQ ID NO: 52 - RNA, 21 nt, Artificial Seqence
  Synthetic siRNA sense strand against b2GPI
uccacaaugauuucuccagug

SEQ ID NO: 53 - RNA, 21 nt, Artificial Seqence
  Synthetic siRNA sense strand against b2GPI
ccacaaugauuucuccagugc

SEQ ID NO: 54 - RNA, 21 nt, Artificial Seqence
  Synthetic siRNA sense strand against b2GPI
cacaaugauuucuccagugcu

SEQ ID NO: 55 - RNA, 21 nt, Artificial Seqence
  Synthetic siRNA sense strand against b2GPI
acaaugauuucuccagugcuc

SEQ ID NO: 56 - RNA, 21 nt, Artificial Seqence
  Synthetic siRNA sense strand against b2GPI
caaugauuucuccagugcuca

SEQ ID NO: 57 - RNA, 21 nt, Artificial Seqence
  Synthetic siRNA sense strand against b2GPI
aaugauuucuccagugcucau

SEQ ID NO: 58 - RNA, 21 nt, Artificial Seqence
  Synthetic siRNA sense strand against b2GPI
augauuucuccagugcucauc

SEQ ID NO: 59 - RNA, 21 nt, Artificial Seqence
  Synthetic siRNA sense strand against b2GPI
ugauuucuccagugcucaucu

SEQ ID NO: 60 - RNA, 21 nt, Artificial Seqence
  Synthetic siRNA sense strand against b2GPI
gauuucuccagugcucaucuu

SEQ ID NO: 61 - RNA, 21 nt, Artificial Seqence
  Synthetic siRNA sense strand against b2GPI
auuucuccagugcucaucuug

SEQ ID NO: 62 - RNA, 21 nt, Artificial Seqence
  Synthetic siRNA sense strand against b2GPI
uuucuccagugcucaucuugu

SEQ ID NO: 63 - RNA, 21 nt, Artificial Seqence
  Synthetic siRNA sense strand against b2GPI
uucuccagugcucaucuuguu

SEQ ID NO: 64 - RNA, 21 nt, Artificial Seqence
  Synthetic siRNA sense strand against b2GPI
ucuccagugcucaucuuguuc

SEQ ID NO: 65 - RNA, 21 nt, Artificial Seqence
  Synthetic siRNA sense strand against b2GPI
cuccagugcucaucuuguucu

SEQ ID NO: 66 - RNA, 21 nt, Artificial Seqence
  Synthetic siRNA sense strand against b2GPI
uccagugcucaucuuguucuc

SEQ ID NO: 67 - RNA, 21 nt, Artificial Seqence
  Synthetic siRNA sense strand against b2GPI
ccagugcucaucuuguucucg

SEQ ID NO: 68 - RNA, 21 nt, Artificial Seqence
  Synthetic siRNA sense strand against b2GPI
cagugcucaucuuguucucga

SEQ ID NO: 69 - RNA, 21 nt, Artificial Seqence
  Synthetic siRNA sense strand against b2GPI
agugcucaucuuguucucgag

SEQ ID NO: 70 - RNA, 21 nt, Artificial Seqence
  Synthetic siRNA sense strand against b2GPI
gugcucaucuuguucucgagu

SEQ ID NO: 71 - RNA, 21 nt, Artificial Seqence
  Synthetic siRNA sense strand against b2GPI
ugcucaucuuguucucgaguu

SEQ ID NO: 72 - RNA, 21 nt, Artificial Seqence
  Synthetic siRNA sense strand against b2GPI
gcucaucuuguucucgaguuu

SEQ ID NO: 73 - RNA, 21 nt, Artificial Seqence
  Synthetic siRNA sense strand against b2GPI
cucaucuuguucucgaguuuu

SEQ ID NO: 74 - RNA, 21 nt, Artificial Seqence
  Synthetic siRNA sense strand against b2GPI
ucaucuuguucucgaguuuuc

SEQ ID NO: 75 - RNA, 21 nt, Artificial Seqence
  Synthetic siRNA sense strand against b2GPI
caucuuguucucgaguuuucu

SEQ ID NO: 76 - RNA, 21 nt, Artificial Seqence
  Synthetic siRNA sense strand against b2GPI
aucuuguucucgaguuuucuc

SEQ ID NO: 77 - RNA, 21 nt, Artificial Seqence
  Synthetic siRNA sense strand against b2GPI
ucuuguucucgaguuuucucu

SEQ ID NO: 78 - RNA, 21 nt, Artificial Seqence
  Synthetic siRNA sense strand against b2GPI
cuuguucucgaguuuucucug

SEQ ID NO: 79 - RNA, 21 nt, Artificial Seqence
  Synthetic siRNA sense strand against b2GPI
uuguucucgaguuuucucugc

SEQ ID NO: 80 - RNA, 21 nt, Artificial Seqence
  Synthetic siRNA sense strand against b2GPI
uguucucgaguuuucucugcc

SEQ ID NO: 81 - RNA, 21 nt, Artificial Seqence
  Synthetic siRNA sense strand against b2GPI
guucucgaguuuucucugcca

SEQ ID NO: 82 - RNA, 21 nt, Artificial Seqence
  Synthetic siRNA sense strand against b2GPI
uucucgaguuuucucugccau

SEQ ID NO: 83 - RNA, 21 nt, Artificial Seqence
  Synthetic siRNA sense strand against b2GPI
ucucgaguuuucucugccaug

SEQ ID NO: 84 - RNA, 21 nt, Artificial Seqence
  Synthetic siRNA sense strand against b2GPI
cucgaguuuucucugccaugu

SEQ ID NO: 85 - RNA, 21 nt, Artificial Seqence
  Synthetic siRNA sense strand against b2GPI
ucgaguuuucucugccauguu

SEQ ID NO: 86 - RNA, 21 nt, Artificial Seqence
  Synthetic siRNA sense strand against b2GPI
cgaguuuucucugccauguug

SEQ ID NO: 87 - RNA, 21 nt, Artificial Seqence
  Synthetic siRNA sense strand against b2GPI
gaguuuucucugccauguugc

SEQ ID NO: 88 - RNA, 21 nt, Artificial Seqence
  Synthetic siRNA sense strand against b2GPI
aguuuucucugccauguugcu

SEQ ID NO: 89 - RNA, 21 nt, Artificial Seqence
  Synthetic siRNA sense strand against b2GPI
guuuucucugccauguugcua

SEQ ID NO: 90 - RNA, 21 nt, Artificial Seqence
  Synthetic siRNA sense strand against b2GPI
uuuucucugccauguugcuau

SEQ ID NO: 91 - RNA, 21 nt, Artificial Seqence
  Synthetic siRNA sense strand against b2GPI
uuucucugccauguugcuauu

SEQ ID NO: 92 - RNA, 21 nt, Artificial Seqence
  Synthetic siRNA sense strand against b2GPI
uucucugccauguugcuauug

SEQ ID NO: 93 - RNA, 21 nt, Artificial Seqence
  Synthetic siRNA sense strand against b2GPI
ucucugccauguugcuauugc

SEQ ID NO: 94 - RNA, 21 nt, Artificial Seqence
  Synthetic siRNA sense strand against b2GPI
cucugccauguugcuauugca

SEQ ID NO: 95 - RNA, 21 nt, Artificial Seqence
  Synthetic siRNA sense strand against b2GPI
ucugccauguugcuauugcag

SEQ ID NO: 96 - RNA, 21 nt, Artificial Seqence
  Synthetic siRNA sense strand against b2GPI
cugccauguugcuauugcagg

SEQ ID NO: 97 - RNA, 21 nt, Artificial Seqence
  Synthetic siRNA sense strand against b2GPI
ugccauguugcuauugcagga

SEQ ID NO: 98 - RNA, 21 nt, Artificial Seqence
  Synthetic siRNA sense strand against b2GPI
gccauguugcuauugcaggac

SEQ ID NO: 99 - RNA, 21 nt, Artificial Seqence
  Synthetic siRNA sense strand against b2GPI
ccauguugcuauugcaggacg

SEQ ID NO: 100 - RNA, 21 nt, Artificial Seqence
  Synthetic siRNA sense strand against b2GPI
cauguugcuauugcaggacgg

SEQ ID NO: 101 - RNA, 21 nt, Artificial Seqence
  Synthetic siRNA sense strand against b2GPI
auguugcuauugcaggacgga

SEQ ID NO: 102 - RNA, 21 nt, Artificial Seqence
  Synthetic siRNA sense strand against b2GPI
uguugcuauugcaggacggac

SEQ ID NO: 103 - RNA, 21 nt, Artificial Seqence
  Synthetic siRNA sense strand against b2GPI
guugcuauugcaggacggacc

SEQ ID NO: 104 - RNA, 21 nt, Artificial Seqence
  Synthetic siRNA sense strand against b2GPI
uugcuauugcaggacggaccu

SEQ ID NO: 105 - RNA, 21 nt, Artificial Seqence
  Synthetic siRNA sense strand against b2GPI
ugcuauugcaggacggaccug

SEQ ID NO: 106 - RNA, 21 nt, Artificial Seqence
  Synthetic siRNA sense strand against b2GPI
gcuauugcaggacggaccugu

SEQ ID NO: 107 - RNA, 21 nt, Artificial Seqence
  Synthetic siRNA sense strand against b2GPI
cuauugcaggacggaccuguc

SEQ ID NO: 108 - RNA, 21 nt, Artificial Seqence
  Synthetic siRNA sense strand against b2GPI
uauugcaggacggaccugucc

SEQ ID NO: 109 - RNA, 21 nt, Artificial Seqence
  Synthetic siRNA sense strand against b2GPI
auugcaggacggaccuguccc

SEQ ID NO: 110 - RNA, 21 nt, Artificial Seqence
  Synthetic siRNA sense strand against b2GPI
uugcaggacggaccuguccca

SEQ ID NO: 111 - RNA, 21 nt, Artificial Seqence
  Synthetic siRNA sense strand against b2GPI
ugcaggacggaccugucccaa

SEQ ID NO: 112 - RNA, 21 nt, Artificial Seqence
  Synthetic siRNA sense strand against b2GPI
gcaggacggaccugucccaag

SEQ ID NO: 113 - RNA, 21 nt, Artificial Seqence
  Synthetic siRNA sense strand against b2GPI
caggacggaccugucccaagc

SEQ ID NO: 114 - RNA, 21 nt, Artificial Seqence
  Synthetic siRNA sense strand against b2GPI
aggacggaccugucccaagcc

SEQ ID NO: 115 - RNA, 21 nt, Artificial Seqence
  Synthetic siRNA sense strand against b2GPI
ggacggaccugucccaagcca

SEQ ID NO: 116 - RNA, 21 nt, Artificial Seqence
  Synthetic siRNA sense strand against b2GPI
gacggaccugucccaagccag

SEQ ID NO: 117 - RNA, 21 nt, Artificial Seqence
  Synthetic siRNA sense strand against b2GPI
acggaccugucccaagccaga

SEQ ID NO: 118 - RNA, 21 nt, Artificial Seqence
  Synthetic siRNA sense strand against b2GPI
cggaccugucccaagccagau

SEQ ID NO: 119 - RNA, 21 nt, Artificial Seqence
  Synthetic siRNA sense strand against b2GPI
ggaccugucccaagccagaug

SEQ ID NO: 120 - RNA, 21 nt, Artificial Seqence
  Synthetic siRNA sense strand against b2GPI
gaccugucccaagccagauga

SEQ ID NO: 121 - RNA, 21 nt, Artificial Seqence
  Synthetic siRNA sense strand against b2GPI
accugucccaagccagaugau

SEQ ID NO: 122 - RNA, 21 nt, Artificial Seqence
  Synthetic siRNA sense strand against b2GPI
ccugucccaagccagaugauu

SEQ ID NO: 123 - RNA, 21 nt, Artificial Seqence
  Synthetic siRNA sense strand against b2GPI
cugucccaagccagaugauuu

SEQ ID NO: 124 - RNA, 21 nt, Artificial Seqence
  Synthetic siRNA sense strand against b2GPI
ugucccaagccagaugauuua

SEQ ID NO: 125 - RNA, 21 nt, Artificial Seqence
  Synthetic siRNA sense strand against b2GPI
gucccaagccagaugauuuac

SEQ ID NO: 126 - RNA, 21 nt, Artificial Seqence
  Synthetic siRNA sense strand against b2GPI
ucccaagccagaugauuuacc

SEQ ID NO: 127 - RNA, 21 nt, Artificial Seqence
  Synthetic siRNA sense strand against b2GPI
cccaagccagaugauuuacca

SEQ ID NO: 128 - RNA, 21 nt, Artificial Seqence
  Synthetic siRNA sense strand against b2GPI
ccaagccagaugauuuaccau

SEQ ID NO: 129 - RNA, 21 nt, Artificial Seqence
  Synthetic siRNA sense strand against b2GPI
caagccagaugauuuaccauu

SEQ ID NO: 130 - RNA, 21 nt, Artificial Seqence
  Synthetic siRNA sense strand against b2GPI
aagccagaugauuuaccauuu

SEQ ID NO: 131 - RNA, 21 nt, Artificial Seqence
  Synthetic siRNA sense strand against b2GPI
agccagaugauuuaccauuuu

SEQ ID NO: 132 - RNA, 21 nt, Artificial Seqence
  Synthetic siRNA sense strand against b2GPI
gccagaugauuuaccauuuuc

SEQ ID NO: 133 - RNA, 21 nt, Artificial Seqence
  Synthetic siRNA sense strand against b2GPI
ccagaugauuuaccauuuucc

SEQ ID NO: 134 - RNA, 21 nt, Artificial Seqence
  Synthetic siRNA sense strand against b2GPI
cagaugauuuaccauuuucca

SEQ ID NO: 135 - RNA, 21 nt, Artificial Seqence
  Synthetic siRNA sense strand against b2GPI
agaugauuuaccauuuuccac

SEQ ID NO: 136 - RNA, 21 nt, Artificial Seqence
  Synthetic siRNA sense strand against b2GPI
gaugauuuaccauuuuccaca

SEQ ID NO: 137 - RNA, 21 nt, Artificial Seqence
  Synthetic siRNA sense strand against b2GPI
augauuuaccauuuuccacag

SEQ ID NO: 138 - RNA, 21 nt, Artificial Seqence
  Synthetic siRNA sense strand against b2GPI
ugauuuaccauuuuccacagu

SEQ ID NO: 139 - RNA, 21 nt, Artificial Seqence
  Synthetic siRNA sense strand against b2GPI
gauuuaccauuuuccacagug

SEQ ID NO: 140 - RNA, 21 nt, Artificial Seqence
  Synthetic siRNA sense strand against b2GPI
auuuaccauuuuccacagugg

SEQ ID NO: 141 - RNA, 21 nt, Artificial Seqence
  Synthetic siRNA sense strand against b2GPI
uuuaccauuuuccacaguggu

SEQ ID NO: 142 - RNA, 21 nt, Artificial Seqence
  Synthetic siRNA sense strand against b2GPI
uuaccauuuuccacagugguc

SEQ ID NO: 143 - RNA, 21 nt, Artificial Seqence
  Synthetic siRNA sense strand against b2GPI
uaccauuuuccacaguggucc

SEQ ID NO: 144 - RNA, 21 nt, Artificial Seqence
  Synthetic siRNA sense strand against b2GPI
accauuuuccacagugguccc

SEQ ID NO: 145 - RNA, 21 nt, Artificial Seqence
  Synthetic siRNA sense strand against b2GPI
ccauuuuccacaguggucccg

SEQ ID NO: 146 - RNA, 21 nt, Artificial Seqence
  Synthetic siRNA sense strand against b2GPI
cauuuuccacaguggucccgu

SEQ ID NO: 147 - RNA, 21 nt, Artificial Seqence
  Synthetic siRNA sense strand against b2GPI
auuuuccacaguggucccguu

SEQ ID NO: 148 - RNA, 21 nt, Artificial Seqence
  Synthetic siRNA sense strand against b2GPI
uuuuccacaguggucccguua

SEQ ID NO: 149 - RNA, 21 nt, Artificial Seqence
  Synthetic siRNA sense strand against b2GPI
uuuccacaguggucccguuaa

SEQ ID NO: 150 - RNA, 21 nt, Artificial Seqence
  Synthetic siRNA sense strand against b2GPI
uuccacaguggucccguuaaa

SEQ ID NO: 151 - RNA, 21 nt, Artificial Seqence
  Synthetic siRNA sense strand against b2GPI
uccacaguggucccguuaaaa

SEQ ID NO: 152 - RNA, 21 nt, Artificial Seqence
  Synthetic siRNA sense strand against b2GPI
ccacaguggucccguuaaaaa

SEQ ID NO: 153 - RNA, 21 nt, Artificial Seqence
  Synthetic siRNA sense strand against b2GPI
cacaguggucccguuaaaaac

SEQ ID NO: 154 - RNA, 21 nt, Artificial Seqence
  Synthetic siRNA sense strand against b2GPI
acaguggucccguuaaaaaca

SEQ ID NO: 155 - RNA, 21 nt, Artificial Seqence
  Synthetic siRNA sense strand against b2GPI
caguggucccguuaaaaacau

SEQ ID NO: 156 - RNA, 21 nt, Artificial Seqence
  Synthetic siRNA sense strand against b2GPI
aguggucccguuaaaaacauu

SEQ ID NO: 157 - RNA, 21 nt, Artificial Seqence
  Synthetic siRNA sense strand against b2GPI
guggucccguuaaaaacauuc

SEQ ID NO: 158 - RNA, 21 nt, Artificial Seqence
  Synthetic siRNA sense strand against b2GPI
uggucccguuaaaaacauucu

SEQ ID NO: 159 - RNA, 21 nt, Artificial Seqence
  Synthetic siRNA sense strand against b2GPI
ggucccguuaaaaacauucua

SEQ ID NO: 160 - RNA, 21 nt, Artificial Seqence
  Synthetic siRNA sense strand against b2GPI
gucccguuaaaaacauucuau

SEQ ID NO: 161 - RNA, 21 nt, Artificial Seqence
  Synthetic siRNA sense strand against b2GPI
ucccguuaaaaacauucuaug

SEQ ID NO: 162 - RNA, 21 nt, Artificial Seqence
  Synthetic siRNA sense strand against b2GPI
cccguuaaaaacauucuauga

SEQ ID NO: 163 - RNA, 21 nt, Artificial Seqence
  Synthetic siRNA sense strand against b2GPI
ccguuaaaaacauucuaugag

SEQ ID NO: 164 - RNA, 21 nt, Artificial Seqence
  Synthetic siRNA sense strand against b2GPI
cguuaaaaacauucuaugagc

SEQ ID NO: 165 - RNA, 21 nt, Artificial Seqence
  Synthetic siRNA sense strand against b2GPI
guuaaaaacauucuaugagcc

SEQ ID NO: 166 - RNA, 21 nt, Artificial Seqence
  Synthetic siRNA sense strand against b2GPI
uuaaaaacauucuaugagcca

SEQ ID NO: 167 - RNA, 21 nt, Artificial Seqence
  Synthetic siRNA sense strand against b2GPI
uaaaaacauucuaugagccag

SEQ ID NO: 168 - RNA, 21 nt, Artificial Seqence
  Synthetic siRNA sense strand against b2GPI
aaaaacauucuaugagccagg

SEQ ID NO: 169 - RNA, 21 nt, Artificial Seqence
  Synthetic siRNA sense strand against b2GPI
aaaacauucuaugagccagga

SEQ ID NO: 170 - RNA, 21 nt, Artificial Seqence
  Synthetic siRNA sense strand against b2GPI
aaacauucuaugagccaggag

SEQ ID NO: 171 - RNA, 21 nt, Artificial Seqence
  Synthetic siRNA sense strand against b2GPI
aacauucuaugagccaggaga

SEQ ID NO: 172 - RNA, 21 nt, Artificial Seqence
  Synthetic siRNA sense strand against b2GPI
acauucuaugagccaggagaa

SEQ ID NO: 173 - RNA, 21 nt, Artificial Seqence
  Synthetic siRNA sense strand against b2GPI
cauucuaugagccaggagaag

SEQ ID NO: 174 - RNA, 21 nt, Artificial Seqence
  Synthetic siRNA sense strand against b2GPI
auucuaugagccaggagaaga

SEQ ID NO: 175 - RNA, 21 nt, Artificial Seqence
  Synthetic siRNA sense strand against b2GPI
uucuaugagccaggagaagag

SEQ ID NO: 176 - RNA, 21 nt, Artificial Seqence
  Synthetic siRNA sense strand against b2GPI
ucuaugagccaggagaagaga

SEQ ID NO: 177 - RNA, 21 nt, Artificial Seqence
  Synthetic siRNA sense strand against b2GPI
cuaugagccaggagaagagau

SEQ ID NO: 178 - RNA, 21 nt, Artificial Seqence
  Synthetic siRNA sense strand against b2GPI
uaugagccaggagaagagauu

SEQ ID NO: 179 - RNA, 21 nt, Artificial Seqence
  Synthetic siRNA sense strand against b2GPI
augagccaggagaagagauua

SEQ ID NO: 180 - RNA, 21 nt, Artificial Seqence
  Synthetic siRNA sense strand against b2GPI
ugagccaggagaagagauuac

SEQ ID NO: 181 - RNA, 21 nt, Artificial Seqence
  Synthetic siRNA sense strand against b2GPI
gagccaggagaagagauuacg

SEQ ID NO: 182 - RNA, 21 nt, Artificial Seqence
  Synthetic siRNA sense strand against b2GPI
agccaggagaagagauuacgu

SEQ ID NO: 183 - RNA, 21 nt, Artificial Seqence
  Synthetic siRNA sense strand against b2GPI
gccaggagaagagauuacgua

SEQ ID NO: 184 - RNA, 21 nt, Artificial Seqence
  Synthetic siRNA sense strand against b2GPI
ccaggagaagagauuacguau

SEQ ID NO: 185 - RNA, 21 nt, Artificial Seqence
  Synthetic siRNA sense strand against b2GPI
caggagaagagauuacguauu

SEQ ID NO: 186 - RNA, 21 nt, Artificial Seqence
  Synthetic siRNA sense strand against b2GPI
aggagaagagauuacguauuc

SEQ ID NO: 187 - RNA, 21 nt, Artificial Seqence
  Synthetic siRNA sense strand against b2GPI
ggagaagagauuacguauucc

SEQ ID NO: 188 - RNA, 21 nt, Artificial Seqence
  Synthetic siRNA sense strand against b2GPI
gagaagagauuacguauuccu

SEQ ID NO: 189 - RNA, 21 nt, Artificial Seqence
  Synthetic siRNA sense strand against b2GPI
agaagagauuacguauuccug

SEQ ID NO: 190 - RNA, 21 nt, Artificial Seqence
  Synthetic siRNA sense strand against b2GPI
gaagagauuacguauuccugc

SEQ ID NO: 191 - RNA, 21 nt, Artificial Seqence
  Synthetic siRNA sense strand against b2GPI
aagagauuacguauuccugca

SEQ ID NO: 192 - RNA, 21 nt, Artificial Seqence
  Synthetic siRNA sense strand against b2GPI
agagauuacguauuccugcaa

SEQ ID NO: 193 - RNA, 21 nt, Artificial Seqence
  Synthetic siRNA sense strand against b2GPI
gagauuacguauuccugcaag

SEQ ID NO: 194 - RNA, 21 nt, Artificial Seqence
  Synthetic siRNA sense strand against b2GPI
agauuacguauuccugcaagc

SEQ ID NO: 195 - RNA, 21 nt, Artificial Seqence
  Synthetic siRNA sense strand against b2GPI
gauuacguauuccugcaagcc

SEQ ID NO: 196 - RNA, 21 nt, Artificial Seqence
  Synthetic siRNA sense strand against b2GPI
auuacguauuccugcaagccg

SEQ ID NO: 197 - RNA, 21 nt, Artificial Seqence
  Synthetic siRNA sense strand against b2GPI
uuacguauuccugcaagccgg

SEQ ID NO: 198 - RNA, 21 nt, Artificial Seqence
  Synthetic siRNA sense strand against b2GPI
uacguauuccugcaagccggg

SEQ ID NO: 199 - RNA, 21 nt, Artificial Seqence
  Synthetic siRNA sense strand against b2GPI
acguauuccugcaagccgggc

SEQ ID NO: 200 - RNA, 21 nt, Artificial Seqence
  Synthetic siRNA sense strand against b2GPI
cguauuccugcaagccgggcu

SEQ ID NO: 201 - RNA, 21 nt, Artificial Seqence
  Synthetic siRNA sense strand against b2GPI
guauuccugcaagccgggcua

SEQ ID NO: 202 - RNA, 21 nt, Artificial Seqence
  Synthetic siRNA sense strand against b2GPI
uauuccugcaagccgggcuau

SEQ ID NO: 203 - RNA, 21 nt, Artificial Seqence
  Synthetic siRNA sense strand against b2GPI
auuccugcaagccgggcuaug

SEQ ID NO: 204 - RNA, 21 nt, Artificial Seqence
  Synthetic siRNA sense strand against b2GPI
uuccugcaagccgggcuaugu

SEQ ID NO: 205 - RNA, 21 nt, Artificial Seqence
  Synthetic siRNA sense strand against b2GPI
uccugcaagccgggcuaugug

SEQ ID NO: 206 - RNA, 21 nt, Artificial Seqence
  Synthetic siRNA sense strand against b2GPI
ccugcaagccgggcuaugugu

SEQ ID NO: 207 - RNA, 21 nt, Artificial Seqence
  Synthetic siRNA sense strand against b2GPI
cugcaagccgggcuauguguc

SEQ ID NO: 208 - RNA, 21 nt, Artificial Seqence
  Synthetic siRNA sense strand against b2GPI
ugcaagccgggcuaugugucc

SEQ ID NO: 209 - RNA, 21 nt, Artificial Seqence
  Synthetic siRNA sense strand against b2GPI
gcaagccgggcuauguguccc

SEQ ID NO: 210 - RNA, 21 nt, Artificial Seqence
  Synthetic siRNA sense strand against b2GPI
caagccgggcuaugugucccg

SEQ ID NO: 211 - RNA, 21 nt, Artificial Seqence
  Synthetic siRNA sense strand against b2GPI
aagccgggcuaugugucccga

SEQ ID NO: 212 - RNA, 21 nt, Artificial Seqence
  Synthetic siRNA sense strand against b2GPI
agccgggcuaugugucccgag

SEQ ID NO: 213 - RNA, 21 nt, Artificial Seqence
  Synthetic siRNA sense strand against b2GPI
gccgggcuaugugucccgagg

SEQ ID NO: 214 - RNA, 21 nt, Artificial Seqence
  Synthetic siRNA sense strand against b2GPI
ccgggcuaugugucccgagga

SEQ ID NO: 215 - RNA, 21 nt, Artificial Seqence
  Synthetic siRNA sense strand against b2GPI
cgggcuaugugucccgaggag

SEQ ID NO: 216 - RNA, 21 nt, Artificial Seqence
  Synthetic siRNA sense strand against b2GPI
gggcuaugugucccgaggagg

SEQ ID NO: 217 - RNA, 21 nt, Artificial Seqence
  Synthetic siRNA sense strand against b2GPI
ggcuaugugucccgaggaggg

SEQ ID NO: 218 - RNA, 21 nt, Artificial Seqence
  Synthetic siRNA sense strand against b2GPI
gcuaugugucccgaggaggga

SEQ ID NO: 219 - RNA, 21 nt, Artificial Seqence
  Synthetic siRNA sense strand against b2GPI
cuaugugucccgaggagggau

SEQ ID NO: 220 - RNA, 21 nt, Artificial Seqence
  Synthetic siRNA sense strand against b2GPI
uaugugucccgaggagggaug

SEQ ID NO: 221 - RNA, 21 nt, Artificial Seqence
  Synthetic siRNA sense strand against b2GPI
augugucccgaggagggauga

SEQ ID NO: 222 - RNA, 21 nt, Artificial Seqence
  Synthetic siRNA sense strand against b2GPI
ugugucccgaggagggaugag

SEQ ID NO: 223 - RNA, 21 nt, Artificial Seqence
  Synthetic siRNA sense strand against b2GPI
gugucccgaggagggaugaga

SEQ ID NO: 224 - RNA, 21 nt, Artificial Seqence
  Synthetic siRNA sense strand against b2GPI
ugucccgaggagggaugagaa

SEQ ID NO: 225 - RNA, 21 nt, Artificial Seqence
  Synthetic siRNA sense strand against b2GPI
gucccgaggagggaugagaaa

SEQ ID NO: 226 - RNA, 21 nt, Artificial Seqence
  Synthetic siRNA sense strand against b2GPI
ucccgaggagggaugagaaag

SEQ ID NO: 227 - RNA, 21 nt, Artificial Seqence
  Synthetic siRNA sense strand against b2GPI
cccgaggagggaugagaaagu

SEQ ID NO: 228 - RNA, 21 nt, Artificial Seqence
  Synthetic siRNA sense strand against b2GPI
ccgaggagggaugagaaaguu

SEQ ID NO: 229 - RNA, 21 nt, Artificial Seqence
  Synthetic siRNA sense strand against b2GPI
cgaggagggaugagaaaguuu

SEQ ID NO: 230 - RNA, 21 nt, Artificial Seqence
  Synthetic siRNA sense strand against b2GPI
gaggagggaugagaaaguuua

SEQ ID NO: 231 - RNA, 21 nt, Artificial Seqence
  Synthetic siRNA sense strand against b2GPI
aggagggaugagaaaguuuau

SEQ ID NO: 232 - RNA, 21 nt, Artificial Seqence
  Synthetic siRNA sense strand against b2GPI
ggagggaugagaaaguuuauc

SEQ ID NO: 233 - RNA, 21 nt, Artificial Seqence
  Synthetic siRNA sense strand against b2GPI
gagggaugagaaaguuuaucu

SEQ ID NO: 234 - RNA, 21 nt, Artificial Seqence
  Synthetic siRNA sense strand against b2GPI
agggaugagaaaguuuaucug

SEQ ID NO: 235 - RNA, 21 nt, Artificial Seqence
  Synthetic siRNA sense strand against b2GPI
gggaugagaaaguuuaucugc

SEQ ID NO: 236 - RNA, 21 nt, Artificial Seqence
  Synthetic siRNA sense strand against b2GPI
ggaugagaaaguuuaucugcc

SEQ ID NO: 237 - RNA, 21 nt, Artificial Seqence
  Synthetic siRNA sense strand against b2GPI
gaugagaaaguuuaucugccc

SEQ ID NO: 238 - RNA, 21 nt, Artificial Seqence
  Synthetic siRNA sense strand against b2GPI
augagaaaguuuaucugcccu

SEQ ID NO: 239 - RNA, 21 nt, Artificial Seqence
  Synthetic siRNA sense strand against b2GPI
ugagaaaguuuaucugcccuc

SEQ ID NO: 240 - RNA, 21 nt, Artificial Seqence
  Synthetic siRNA sense strand against b2GPI
gagaaaguuuaucugcccucu

SEQ ID NO: 241 - RNA, 21 nt, Artificial Seqence
  Synthetic siRNA sense strand against b2GPI
agaaaguuuaucugcccucuc

SEQ ID NO: 242 - RNA, 21 nt, Artificial Seqence
  Synthetic siRNA sense strand against b2GPI
gaaaguuuaucugcccucuca

SEQ ID NO: 243 - RNA, 21 nt, Artificial Seqence
  Synthetic siRNA sense strand against b2GPI
aaaguuuaucugcccucucac

SEQ ID NO: 244 - RNA, 21 nt, Artificial Seqence
  Synthetic siRNA sense strand against b2GPI
aaguuuaucugcccucucaca

SEQ ID NO: 245 - RNA, 21 nt, Artificial Seqence
  Synthetic siRNA sense strand against b2GPI
aguuuaucugcccucucacag

SEQ ID NO: 246 - RNA, 21 nt, Artificial Seqence
  Synthetic siRNA sense strand against b2GPI
guuuaucugcccucucacagg

SEQ ID NO: 247 - RNA, 21 nt, Artificial Seqence
  Synthetic siRNA sense strand against b2GPI
uuuaucugcccucucacagga

SEQ ID NO: 248 - RNA, 21 nt, Artificial Seqence
  Synthetic siRNA sense strand against b2GPI
uuaucugcccucucacaggac

SEQ ID NO: 249 - RNA, 21 nt, Artificial Seqence
  Synthetic siRNA sense strand against b2GPI
uaucugcccucucacaggacu

SEQ ID NO: 250 - RNA, 21 nt, Artificial Seqence
  Synthetic siRNA sense strand against b2GPI
aucugcccucucacaggacug

SEQ ID NO: 251 - RNA, 21 nt, Artificial Seqence
  Synthetic siRNA sense strand against b2GPI
ucugcccucucacaggacugu

SEQ ID NO: 252 - RNA, 21 nt, Artificial Seqence
  Synthetic siRNA sense strand against b2GPI
cugcccucucacaggacugug

SEQ ID NO: 253 - RNA, 21 nt, Artificial Seqence
  Synthetic siRNA sense strand against b2GPI
ugcccucucacaggacugugg

SEQ ID NO: 254 - RNA, 21 nt, Artificial Seqence
  Synthetic siRNA sense strand against b2GPI
gcccucucacaggacuguggc

SEQ ID NO: 255 - RNA, 21 nt, Artificial Seqence
  Synthetic siRNA sense strand against b2GPI
cccucucacaggacuguggcc

SEQ ID NO: 256 - RNA, 21 nt, Artificial Seqence
  Synthetic siRNA sense strand against b2GPI
ccucucacaggacuguggccc

SEQ ID NO: 257 - RNA, 21 nt, Artificial Seqence
  Synthetic siRNA sense strand against b2GPI
cucucacaggacuguggccca

SEQ ID NO: 258 - RNA, 21 nt, Artificial Seqence
  Synthetic siRNA sense strand against b2GPI
ucucacaggacuguggcccau

SEQ ID NO: 259 - RNA, 21 nt, Artificial Seqence
  Synthetic siRNA sense strand against b2GPI
cucacaggacuguggcccauc

SEQ ID NO: 260 - RNA, 21 nt, Artificial Seqence
  Synthetic siRNA sense strand against b2GPI
ucacaggacuguggcccauca

SEQ ID NO: 261 - RNA, 21 nt, Artificial Seqence
  Synthetic siRNA sense strand against b2GPI
cacaggacuguggcccaucaa

SEQ ID NO: 262 - RNA, 21 nt, Artificial Seqence
  Synthetic siRNA sense strand against b2GPI
acaggacuguggcccaucaac

SEQ ID NO: 263 - RNA, 21 nt, Artificial Seqence
  Synthetic siRNA sense strand against b2GPI
caggacuguggcccaucaaca

SEQ ID NO: 264 - RNA, 21 nt, Artificial Seqence
  Synthetic siRNA sense strand against b2GPI
aggacuguggcccaucaacac

SEQ ID NO: 265 - RNA, 21 nt, Artificial Seqence
  Synthetic siRNA sense strand against b2GPI
ggacuguggcccaucaacacu

SEQ ID NO: 266 - RNA, 21 nt, Artificial Seqence
  Synthetic siRNA sense strand against b2GPI
gacuguggcccaucaacacuc

SEQ ID NO: 267 - RNA, 21 nt, Artificial Seqence
  Synthetic siRNA sense strand against b2GPI
acuguggcccaucaacacucu

SEQ ID NO: 268 - RNA, 21 nt, Artificial Seqence
  Synthetic siRNA sense strand against b2GPI
cuguggcccaucaacacucug

SEQ ID NO: 269 - RNA, 21 nt, Artificial Seqence
  Synthetic siRNA sense strand against b2GPI
uguggcccaucaacacucuga

SEQ ID NO: 270 - RNA, 21 nt, Artificial Seqence
  Synthetic siRNA sense strand against b2GPI
guggcccaucaacacucugaa

SEQ ID NO: 271 - RNA, 21 nt, Artificial Seqence
  Synthetic siRNA sense strand against b2GPI
uggcccaucaacacucugaaa

SEQ ID NO: 272 - RNA, 21 nt, Artificial Seqence
  Synthetic siRNA sense strand against b2GPI
ggcccaucaacacucugaaau

SEQ ID NO: 273 - RNA, 21 nt, Artificial Seqence
  Synthetic siRNA sense strand against b2GPI
gcccaucaacacucugaaaug

SEQ ID NO: 274 - RNA, 21 nt, Artificial Seqence
  Synthetic siRNA sense strand against b2GPI
cccaucaacacucugaaaugu

SEQ ID NO: 275 - RNA, 21 nt, Artificial Seqence
  Synthetic siRNA sense strand against b2GPI
ccaucaacacucugaaaugua

SEQ ID NO: 276 - RNA, 21 nt, Artificial Seqence
  Synthetic siRNA sense strand against b2GPI
caucaacacucugaaauguac

SEQ ID NO: 277 - RNA, 21 nt, Artificial Seqence
  Synthetic siRNA sense strand against b2GPI
aucaacacucugaaauguaca

SEQ ID NO: 278 - RNA, 21 nt, Artificial Seqence
  Synthetic siRNA sense strand against b2GPI
ucaacacucugaaauguacac

SEQ ID NO: 279 - RNA, 21 nt, Artificial Seqence
  Synthetic siRNA sense strand against b2GPI
caacacucugaaauguacacc

SEQ ID NO: 280 - RNA, 21 nt, Artificial Seqence
  Synthetic siRNA sense strand against b2GPI
aacacucugaaauguacaccc

SEQ ID NO: 281 - RNA, 21 nt, Artificial Seqence
  Synthetic siRNA sense strand against b2GPI
acacucugaaauguacaccca

SEQ ID NO: 282 - RNA, 21 nt, Artificial Seqence
  Synthetic siRNA sense strand against b2GPI
cacucugaaauguacacccag

SEQ ID NO: 283 - RNA, 21 nt, Artificial Seqence
  Synthetic siRNA sense strand against b2GPI
acucugaaauguacacccaga

SEQ ID NO: 284 - RNA, 21 nt, Artificial Seqence
  Synthetic siRNA sense strand against b2GPI
cucugaaauguacacccagag

SEQ ID NO: 285 - RNA, 21 nt, Artificial Seqence
  Synthetic siRNA sense strand against b2GPI
ucugaaauguacacccagagu

SEQ ID NO: 286 - RNA, 21 nt, Artificial Seqence
  Synthetic siRNA sense strand against b2GPI
cugaaauguacacccagagua

SEQ ID NO: 287 - RNA, 21 nt, Artificial Seqence
  Synthetic siRNA sense strand against b2GPI
ugaaauguacacccagaguau

SEQ ID NO: 288 - RNA, 21 nt, Artificial Seqence
  Synthetic siRNA sense strand against b2GPI
gaaauguacacccagaguaug

SEQ ID NO: 289 - RNA, 21 nt, Artificial Seqence
  Synthetic siRNA sense strand against b2GPI
aaauguacacccagaguaugu

SEQ ID NO: 290 - RNA, 21 nt, Artificial Seqence
  Synthetic siRNA sense strand against b2GPI
aauguacacccagaguauguc

SEQ ID NO: 291 - RNA, 21 nt, Artificial Seqence
  Synthetic siRNA sense strand against b2GPI
auguacacccagaguaugucc

SEQ ID NO: 292 - RNA, 21 nt, Artificial Seqence
  Synthetic siRNA sense strand against b2GPI
uguacacccagaguauguccu

SEQ ID NO: 293 - RNA, 21 nt, Artificial Seqence
  Synthetic siRNA sense strand against b2GPI
guacacccagaguauguccuu

SEQ ID NO: 294 - RNA, 21 nt, Artificial Seqence
  Synthetic siRNA sense strand against b2GPI
uacacccagaguauguccuuu

SEQ ID NO: 295 - RNA, 21 nt, Artificial Seqence
  Synthetic siRNA sense strand against b2GPI
acacccagaguauguccuuuu

SEQ ID NO: 296 - RNA, 21 nt, Artificial Seqence
  Synthetic siRNA sense strand against b2GPI
cacccagaguauguccuuuug

SEQ ID NO: 297 - RNA, 21 nt, Artificial Seqence
  Synthetic siRNA sense strand against b2GPI
acccagaguauguccuuuugc

SEQ ID NO: 298 - RNA, 21 nt, Artificial Seqence
  Synthetic siRNA sense strand against b2GPI
cccagaguauguccuuuugcu

SEQ ID NO: 299 - RNA, 21 nt, Artificial Seqence
  Synthetic siRNA sense strand against b2GPI
ccagaguauguccuuuugcug

SEQ ID NO: 300 - RNA, 21 nt, Artificial Seqence
  Synthetic siRNA sense strand against b2GPI
cagaguauguccuuuugcugg

SEQ ID NO: 301 - RNA, 21 nt, Artificial Seqence
  Synthetic siRNA sense strand against b2GPI
agaguauguccuuuugcugga

SEQ ID NO: 302 - RNA, 21 nt, Artificial Seqence
  Synthetic siRNA sense strand against b2GPI
gaguauguccuuuugcuggaa

SEQ ID NO: 303 - RNA, 21 nt, Artificial Seqence
  Synthetic siRNA sense strand against b2GPI
aguauguccuuuugcuggaau

SEQ ID NO: 304 - RNA, 21 nt, Artificial Seqence
  Synthetic siRNA sense strand against b2GPI
guauguccuuuugcuggaauc

SEQ ID NO: 305 - RNA, 21 nt, Artificial Seqence
  Synthetic siRNA sense strand against b2GPI
uauguccuuuugcuggaaucu

SEQ ID NO: 306 - RNA, 21 nt, Artificial Seqence
  Synthetic siRNA sense strand against b2GPI
auguccuuuugcuggaaucuu

SEQ ID NO: 307 - RNA, 21 nt, Artificial Seqence
  Synthetic siRNA sense strand against b2GPI
uguccuuuugcuggaaucuua

SEQ ID NO: 308 - RNA, 21 nt, Artificial Seqence
  Synthetic siRNA sense strand against b2GPI
guccuuuugcuggaaucuuag

SEQ ID NO: 309 - RNA, 21 nt, Artificial Seqence
  Synthetic siRNA sense strand against b2GPI
uccuuuugcuggaaucuuaga

SEQ ID NO: 310 - RNA, 21 nt, Artificial Seqence
  Synthetic siRNA sense strand against b2GPI
ccuuuugcuggaaucuuagaa

SEQ ID NO: 311 - RNA, 21 nt, Artificial Seqence
  Synthetic siRNA sense strand against b2GPI
cuuuugcuggaaucuuagaaa

SEQ ID NO: 312 - RNA, 21 nt, Artificial Seqence
  Synthetic siRNA sense strand against b2GPI
uuuugcuggaaucuuagaaaa

SEQ ID NO: 313 - RNA, 21 nt, Artificial Seqence
  Synthetic siRNA sense strand against b2GPI
uuugcuggaaucuuagaaaau

SEQ ID NO: 314 - RNA, 21 nt, Artificial Seqence
  Synthetic siRNA sense strand against b2GPI
uugcuggaaucuuagaaaaug

SEQ ID NO: 315 - RNA, 21 nt, Artificial Seqence
  Synthetic siRNA sense strand against b2GPI
ugcuggaaucuuagaaaaugg

SEQ ID NO: 316 - RNA, 21 nt, Artificial Seqence
  Synthetic siRNA sense strand against b2GPI
gcuggaaucuuagaaaaugga

SEQ ID NO: 317 - RNA, 21 nt, Artificial Seqence
  Synthetic siRNA sense strand against b2GPI
cuggaaucuuagaaaauggag

SEQ ID NO: 318 - RNA, 21 nt, Artificial Seqence
  Synthetic siRNA sense strand against b2GPI
uggaaucuuagaaaauggagc

SEQ ID NO: 319 - RNA, 21 nt, Artificial Seqence
  Synthetic siRNA sense strand against b2GPI
ggaaucuuagaaaauggagcc

SEQ ID NO: 320 - RNA, 21 nt, Artificial Seqence
  Synthetic siRNA sense strand against b2GPI
gaaucuuagaaaauggagccg

SEQ ID NO: 321 - RNA, 21 nt, Artificial Seqence
  Synthetic siRNA sense strand against b2GPI
aaucuuagaaaauggagccgu

SEQ ID NO: 322 - RNA, 21 nt, Artificial Seqence
  Synthetic siRNA sense strand against b2GPI
aucuuagaaaauggagccgua

SEQ ID NO: 323 - RNA, 21 nt, Artificial Seqence
  Synthetic siRNA sense strand against b2GPI
ucuuagaaaauggagccguac

SEQ ID NO: 324 - RNA, 21 nt, Artificial Seqence
  Synthetic siRNA sense strand against b2GPI
cuuagaaaauggagccguacg

SEQ ID NO: 325 - RNA, 21 nt, Artificial Seqence
  Synthetic siRNA sense strand against b2GPI
uuagaaaauggagccguacgc

SEQ ID NO: 326 - RNA, 21 nt, Artificial Seqence
  Synthetic siRNA sense strand against b2GPI
uagaaaauggagccguacgcu

SEQ ID NO: 327 - RNA, 21 nt, Artificial Seqence
  Synthetic siRNA sense strand against b2GPI
agaaaauggagccguacgcua

SEQ ID NO: 328 - RNA, 21 nt, Artificial Seqence
  Synthetic siRNA sense strand against b2GPI
gaaaauggagccguacgcuau

SEQ ID NO: 329 - RNA, 21 nt, Artificial Seqence
  Synthetic siRNA sense strand against b2GPI
aaaauggagccguacgcuaua

SEQ ID NO: 330 - RNA, 21 nt, Artificial Seqence
  Synthetic siRNA sense strand against b2GPI
aaauggagccguacgcuauac

SEQ ID NO: 331 - RNA, 21 nt, Artificial Seqence
  Synthetic siRNA sense strand against b2GPI
aauggagccguacgcuauacg

SEQ ID NO: 332 - RNA, 21 nt, Artificial Seqence
  Synthetic siRNA sense strand against b2GPI
auggagccguacgcuauacga

SEQ ID NO: 333 - RNA, 21 nt, Artificial Seqence
  Synthetic siRNA sense strand against b2GPI
uggagccguacgcuauacgac

SEQ ID NO: 334 - RNA, 21 nt, Artificial Seqence
  Synthetic siRNA sense strand against b2GPI
ggagccguacgcuauacgacu

SEQ ID NO: 335 - RNA, 21 nt, Artificial Seqence
  Synthetic siRNA sense strand against b2GPI
gagccguacgcuauacgacuu

SEQ ID NO: 336 - RNA, 21 nt, Artificial Seqence
  Synthetic siRNA sense strand against b2GPI
agccguacgcuauacgacuuu

SEQ ID NO: 337 - RNA, 21 nt, Artificial Seqence
  Synthetic siRNA sense strand against b2GPI
gccguacgcuauacgacuuuu

SEQ ID NO: 338 - RNA, 21 nt, Artificial Seqence
  Synthetic siRNA sense strand against b2GPI
ccguacgcuauacgacuuuug

SEQ ID NO: 339 - RNA, 21 nt, Artificial Seqence
  Synthetic siRNA sense strand against b2GPI
cguacgcuauacgacuuuuga

SEQ ID NO: 340 - RNA, 21 nt, Artificial Seqence
  Synthetic siRNA sense strand against b2GPI
guacgcuauacgacuuuugaa

SEQ ID NO: 341 - RNA, 21 nt, Artificial Seqence
  Synthetic siRNA sense strand against b2GPI
uacgcuauacgacuuuugaau

SEQ ID NO: 342 - RNA, 21 nt, Artificial Seqence
  Synthetic siRNA sense strand against b2GPI
acgcuauacgacuuuugaaua

SEQ ID NO: 343 - RNA, 21 nt, Artificial Seqence
  Synthetic siRNA sense strand against b2GPI
cgcuauacgacuuuugaauau

SEQ ID NO: 344 - RNA, 21 nt, Artificial Seqence
  Synthetic siRNA sense strand against b2GPI
gcuauacgacuuuugaauauc

SEQ ID NO: 345 - RNA, 21 nt, Artificial Seqence
  Synthetic siRNA sense strand against b2GPI
cuauacgacuuuugaauaucc

SEQ ID NO: 346 - RNA, 21 nt, Artificial Seqence
  Synthetic siRNA sense strand against b2GPI
uauacgacuuuugaauauccc

SEQ ID NO: 347 - RNA, 21 nt, Artificial Seqence
  Synthetic siRNA sense strand against b2GPI
auacgacuuuugaauauccca

SEQ ID NO: 348 - RNA, 21 nt, Artificial Seqence
  Synthetic siRNA sense strand against b2GPI
uacgacuuuugaauaucccaa

SEQ ID NO: 349 - RNA, 21 nt, Artificial Seqence
  Synthetic siRNA sense strand against b2GPI
acgacuuuugaauaucccaac

SEQ ID NO: 350 - RNA, 21 nt, Artificial Seqence
  Synthetic siRNA sense strand against b2GPI
cgacuuuugaauaucccaaca

SEQ ID NO: 351 - RNA, 21 nt, Artificial Seqence
  Synthetic siRNA sense strand against b2GPI
gacuuuugaauaucccaacac

SEQ ID NO: 352 - RNA, 21 nt, Artificial Seqence
  Synthetic siRNA sense strand against b2GPI
acuuuugaauaucccaacacg

SEQ ID NO: 353 - RNA, 21 nt, Artificial Seqence
  Synthetic siRNA sense strand against b2GPI
cuuuugaauaucccaacacga

SEQ ID NO: 354 - RNA, 21 nt, Artificial Seqence
  Synthetic siRNA sense strand against b2GPI
uuuugaauaucccaacacgau

SEQ ID NO: 355 - RNA, 21 nt, Artificial Seqence
  Synthetic siRNA sense strand against b2GPI
uuugaauaucccaacacgauc

SEQ ID NO: 356 - RNA, 21 nt, Artificial Seqence
  Synthetic siRNA sense strand against b2GPI
uugaauaucccaacacgauca

SEQ ID NO: 357 - RNA, 21 nt, Artificial Seqence
  Synthetic siRNA sense strand against b2GPI
ugaauaucccaacacgaucag

SEQ ID NO: 358 - RNA, 21 nt, Artificial Seqence
  Synthetic siRNA sense strand against b2GPI
gaauaucccaacacgaucagu

SEQ ID NO: 359 - RNA, 21 nt, Artificial Seqence
  Synthetic siRNA sense strand against b2GPI
aauaucccaacacgaucaguu

SEQ ID NO: 360 - RNA, 21 nt, Artificial Seqence
  Synthetic siRNA sense strand against b2GPI
auaucccaacacgaucaguuu

SEQ ID NO: 361 - RNA, 21 nt, Artificial Seqence
  Synthetic siRNA sense strand against b2GPI
uaucccaacacgaucaguuuu

SEQ ID NO: 362 - RNA, 21 nt, Artificial Seqence
  Synthetic siRNA sense strand against b2GPI
aucccaacacgaucaguuuuu

SEQ ID NO: 363 - RNA, 21 nt, Artificial Seqence
  Synthetic siRNA sense strand against b2GPI
ucccaacacgaucaguuuuuc

SEQ ID NO: 364 - RNA, 21 nt, Artificial Seqence
  Synthetic siRNA sense strand against b2GPI
cccaacacgaucaguuuuucu

SEQ ID NO: 365 - RNA, 21 nt, Artificial Seqence
  Synthetic siRNA sense strand against b2GPI
ccaacacgaucaguuuuucuu

SEQ ID NO: 366 - RNA, 21 nt, Artificial Seqence
  Synthetic siRNA sense strand against b2GPI
caacacgaucaguuuuucuug

SEQ ID NO: 367 - RNA, 21 nt, Artificial Seqence
  Synthetic siRNA sense strand against b2GPI
aacacgaucaguuuuucuugu

SEQ ID NO: 368 - RNA, 21 nt, Artificial Seqence
  Synthetic siRNA sense strand against b2GPI
acacgaucaguuuuucuugua

SEQ ID NO: 369 - RNA, 21 nt, Artificial Seqence
  Synthetic siRNA sense strand against b2GPI
cacgaucaguuuuucuuguaa

SEQ ID NO: 370 - RNA, 21 nt, Artificial Seqence
  Synthetic siRNA sense strand against b2GPI
acgaucaguuuuucuuguaac

SEQ ID NO: 371 - RNA, 21 nt, Artificial Seqence
  Synthetic siRNA sense strand against b2GPI
cgaucaguuuuucuuguaaca

SEQ ID NO: 372 - RNA, 21 nt, Artificial Seqence
  Synthetic siRNA sense strand against b2GPI
gaucaguuuuucuuguaacac

SEQ ID NO: 373 - RNA, 21 nt, Artificial Seqence
  Synthetic siRNA sense strand against b2GPI
aucaguuuuucuuguaacacu

SEQ ID NO: 374 - RNA, 21 nt, Artificial Seqence
  Synthetic siRNA sense strand against b2GPI
ucaguuuuucuuguaacacug

SEQ ID NO: 375 - RNA, 21 nt, Artificial Seqence
  Synthetic siRNA sense strand against b2GPI
caguuuuucuuguaacacugg

SEQ ID NO: 376 - RNA, 21 nt, Artificial Seqence
  Synthetic siRNA sense strand against b2GPI
aguuuuucuuguaacacuggg

SEQ ID NO: 377 - RNA, 21 nt, Artificial Seqence
  Synthetic siRNA sense strand against b2GPI
guuuuucuuguaacacugggu

SEQ ID NO: 378 - RNA, 21 nt, Artificial Seqence
  Synthetic siRNA sense strand against b2GPI
uuuuucuuguaacacuggguu

SEQ ID NO: 379 - RNA, 21 nt, Artificial Seqence
  Synthetic siRNA sense strand against b2GPI
uuuucuuguaacacuggguuu

SEQ ID NO: 380 - RNA, 21 nt, Artificial Seqence
  Synthetic siRNA sense strand against b2GPI
uuucuuguaacacuggguuuu

SEQ ID NO: 381 - RNA, 21 nt, Artificial Seqence
  Synthetic siRNA sense strand against b2GPI
uucuuguaacacuggguuuua

SEQ ID NO: 382 - RNA, 21 nt, Artificial Seqence
  Synthetic siRNA sense strand against b2GPI
ucuuguaacacuggguuuuau

SEQ ID NO: 383 - RNA, 21 nt, Artificial Seqence
  Synthetic siRNA sense strand against b2GPI
cuuguaacacuggguuuuauc

SEQ ID NO: 384 - RNA, 21 nt, Artificial Seqence
  Synthetic siRNA sense strand against b2GPI
uuguaacacuggguuuuaucu

SEQ ID NO: 385 - RNA, 21 nt, Artificial Seqence
  Synthetic siRNA sense strand against b2GPI
uguaacacuggguuuuaucug

SEQ ID NO: 386 - RNA, 21 nt, Artificial Seqence
  Synthetic siRNA sense strand against b2GPI
guaacacuggguuuuaucuga

SEQ ID NO: 387 - RNA, 21 nt, Artificial Seqence
  Synthetic siRNA sense strand against b2GPI
uaacacuggguuuuaucugaa

SEQ ID NO: 388 - RNA, 21 nt, Artificial Seqence
  Synthetic siRNA sense strand against b2GPI
aacacuggguuuuaucugaau

SEQ ID NO: 389 - RNA, 21 nt, Artificial Seqence
  Synthetic siRNA sense strand against b2GPI
acacuggguuuuaucugaaug

SEQ ID NO: 390 - RNA, 21 nt, Artificial Seqence
  Synthetic siRNA sense strand against b2GPI
cacuggguuuuaucugaaugg

SEQ ID NO: 391 - RNA, 21 nt, Artificial Seqence
  Synthetic siRNA sense strand against b2GPI
acuggguuuuaucugaauggc

SEQ ID NO: 392 - RNA, 21 nt, Artificial Seqence
  Synthetic siRNA sense strand against b2GPI
cuggguuuuaucugaauggcg

SEQ ID NO: 393 - RNA, 21 nt, Artificial Seqence
  Synthetic siRNA sense strand against b2GPI
uggguuuuaucugaauggcgc

SEQ ID NO: 394 - RNA, 21 nt, Artificial Seqence
  Synthetic siRNA sense strand against b2GPI
ggguuuuaucugaauggcgcu

SEQ ID NO: 395 - RNA, 21 nt, Artificial Seqence
  Synthetic siRNA sense strand against b2GPI
gguuuuaucugaauggcgcug

SEQ ID NO: 396 - RNA, 21 nt, Artificial Seqence
  Synthetic siRNA sense strand against b2GPI
guuuuaucugaauggcgcuga

SEQ ID NO: 397 - RNA, 21 nt, Artificial Seqence
  Synthetic siRNA sense strand against b2GPI
uuuuaucugaauggcgcugau

SEQ ID NO: 398 - RNA, 21 nt, Artificial Seqence
  Synthetic siRNA sense strand against b2GPI
uuuaucugaauggcgcugauu

SEQ ID NO: 399 - RNA, 21 nt, Artificial Seqence
  Synthetic siRNA sense strand against b2GPI
uuaucugaauggcgcugauuc

SEQ ID NO: 400 - RNA, 21 nt, Artificial Seqence
  Synthetic siRNA sense strand against b2GPI
uaucugaauggcgcugauucu

SEQ ID NO: 401 - RNA, 21 nt, Artificial Seqence
  Synthetic siRNA sense strand against b2GPI
aucugaauggcgcugauucug

SEQ ID NO: 402 - RNA, 21 nt, Artificial Seqence
  Synthetic siRNA sense strand against b2GPI
ucugaauggcgcugauucugc

SEQ ID NO: 403 - RNA, 21 nt, Artificial Seqence
  Synthetic siRNA sense strand against b2GPI
cugaauggcgcugauucugcc

SEQ ID NO: 404 - RNA, 21 nt, Artificial Seqence
  Synthetic siRNA sense strand against b2GPI
ugaauggcgcugauucugcca

SEQ ID NO: 405 - RNA, 21 nt, Artificial Seqence
  Synthetic siRNA sense strand against b2GPI
gaauggcgcugauucugccaa

SEQ ID NO: 406 - RNA, 21 nt, Artificial Seqence
  Synthetic siRNA sense strand against b2GPI
aauggcgcugauucugccaag

SEQ ID NO: 407 - RNA, 21 nt, Artificial Seqence
  Synthetic siRNA sense strand against b2GPI
auggcgcugauucugccaagu

SEQ ID NO: 408 - RNA, 21 nt, Artificial Seqence
  Synthetic siRNA sense strand against b2GPI
uggcgcugauucugccaagug

SEQ ID NO: 409 - RNA, 21 nt, Artificial Seqence
  Synthetic siRNA sense strand against b2GPI
ggcgcugauucugccaagugc

SEQ ID NO: 410 - RNA, 21 nt, Artificial Seqence
  Synthetic siRNA sense strand against b2GPI
gcgcugauucugccaagugca

SEQ ID NO: 411 - RNA, 21 nt, Artificial Seqence
  Synthetic siRNA sense strand against b2GPI
cgcugauucugccaagugcac

SEQ ID NO: 412 - RNA, 21 nt, Artificial Seqence
  Synthetic siRNA sense strand against b2GPI
gcugauucugccaagugcacu

SEQ ID NO: 413 - RNA, 21 nt, Artificial Seqence
  Synthetic siRNA sense strand against b2GPI
cugauucugccaagugcacug

SEQ ID NO: 414 - RNA, 21 nt, Artificial Seqence
  Synthetic siRNA sense strand against b2GPI
ugauucugccaagugcacuga

SEQ ID NO: 415 - RNA, 21 nt, Artificial Seqence
  Synthetic siRNA sense strand against b2GPI
gauucugccaagugcacugag

SEQ ID NO: 416 - RNA, 21 nt, Artificial Seqence
  Synthetic siRNA sense strand against b2GPI
auucugccaagugcacugagg

SEQ ID NO: 417 - RNA, 21 nt, Artificial Seqence
  Synthetic siRNA sense strand against b2GPI
uucugccaagugcacugagga

SEQ ID NO: 418 - RNA, 21 nt, Artificial Seqence
  Synthetic siRNA sense strand against b2GPI
ucugccaagugcacugaggaa

SEQ ID NO: 419 - RNA, 21 nt, Artificial Seqence
  Synthetic siRNA sense strand against b2GPI
cugccaagugcacugaggaag

SEQ ID NO: 420 - RNA, 21 nt, Artificial Seqence
  Synthetic siRNA sense strand against b2GPI
ugccaagugcacugaggaagg

SEQ ID NO: 421 - RNA, 21 nt, Artificial Seqence
  Synthetic siRNA sense strand against b2GPI
gccaagugcacugaggaagga

SEQ ID NO: 422 - RNA, 21 nt, Artificial Seqence
  Synthetic siRNA sense strand against b2GPI
ccaagugcacugaggaaggaa

SEQ ID NO: 423 - RNA, 21 nt, Artificial Seqence
  Synthetic siRNA sense strand against b2GPI
caagugcacugaggaaggaaa

SEQ ID NO: 424 - RNA, 21 nt, Artificial Seqence
  Synthetic siRNA sense strand against b2GPI
aagugcacugaggaaggaaaa

SEQ ID NO: 425 - RNA, 21 nt, Artificial Seqence
  Synthetic siRNA sense strand against b2GPI
agugcacugaggaaggaaaau

SEQ ID NO: 426 - RNA, 21 nt, Artificial Seqence
  Synthetic siRNA sense strand against b2GPI
gugcacugaggaaggaaaaug

SEQ ID NO: 427 - RNA, 21 nt, Artificial Seqence
  Synthetic siRNA sense strand against b2GPI
ugcacugaggaaggaaaaugg

SEQ ID NO: 428 - RNA, 21 nt, Artificial Seqence
  Synthetic siRNA sense strand against b2GPI
gcacugaggaaggaaaaugga

SEQ ID NO: 429 - RNA, 21 nt, Artificial Seqence
  Synthetic siRNA sense strand against b2GPI
cacugaggaaggaaaauggag

SEQ ID NO: 430 - RNA, 21 nt, Artificial Seqence
  Synthetic siRNA sense strand against b2GPI
acugaggaaggaaaauggagc

SEQ ID NO: 431 - RNA, 21 nt, Artificial Seqence
  Synthetic siRNA sense strand against b2GPI
cugaggaaggaaaauggagcc

SEQ ID NO: 432 - RNA, 21 nt, Artificial Seqence
  Synthetic siRNA sense strand against b2GPI
ugaggaaggaaaauggagccc

SEQ ID NO: 433 - RNA, 21 nt, Artificial Seqence
  Synthetic siRNA sense strand against b2GPI
gaggaaggaaaauggagcccg

SEQ ID NO: 434 - RNA, 21 nt, Artificial Seqence
  Synthetic siRNA sense strand against b2GPI
aggaaggaaaauggagcccgg

SEQ ID NO: 435 - RNA, 21 nt, Artificial Seqence
  Synthetic siRNA sense strand against b2GPI
ggaaggaaaauggagcccgga

SEQ ID NO: 436 - RNA, 21 nt, Artificial Seqence
  Synthetic siRNA sense strand against b2GPI
gaaggaaaauggagcccggag

SEQ ID NO: 437 - RNA, 21 nt, Artificial Seqence
  Synthetic siRNA sense strand against b2GPI
aaggaaaauggagcccggagc

SEQ ID NO: 438 - RNA, 21 nt, Artificial Seqence
  Synthetic siRNA sense strand against b2GPI
aggaaaauggagcccggagcu

SEQ ID NO: 439 - RNA, 21 nt, Artificial Seqence
  Synthetic siRNA sense strand against b2GPI
ggaaaauggagcccggagcuu

SEQ ID NO: 440 - RNA, 21 nt, Artificial Seqence
  Synthetic siRNA sense strand against b2GPI
gaaaauggagcccggagcuuc

SEQ ID NO: 441 - RNA, 21 nt, Artificial Seqence
  Synthetic siRNA sense strand against b2GPI
aaaauggagcccggagcuucc

SEQ ID NO: 442 - RNA, 21 nt, Artificial Seqence
  Synthetic siRNA sense strand against b2GPI
aaauggagcccggagcuuccu

SEQ ID NO: 443 - RNA, 21 nt, Artificial Seqence
  Synthetic siRNA sense strand against b2GPI
aauggagcccggagcuuccug

SEQ ID NO: 444 - RNA, 21 nt, Artificial Seqence
  Synthetic siRNA sense strand against b2GPI
auggagcccggagcuuccugu

SEQ ID NO: 445 - RNA, 21 nt, Artificial Seqence
  Synthetic siRNA sense strand against b2GPI
uggagcccggagcuuccuguc

SEQ ID NO: 446 - RNA, 21 nt, Artificial Seqence
  Synthetic siRNA sense strand against b2GPI
ggagcccggagcuuccugucu

SEQ ID NO: 447 - RNA, 21 nt, Artificial Seqence
  Synthetic siRNA sense strand against b2GPI
gagcccggagcuuccugucug

SEQ ID NO: 448 - RNA, 21 nt, Artificial Seqence
  Synthetic siRNA sense strand against b2GPI
agcccggagcuuccugucugu

SEQ ID NO: 449 - RNA, 21 nt, Artificial Seqence
  Synthetic siRNA sense strand against b2GPI
gcccggagcuuccugucugug

SEQ ID NO: 450 - RNA, 21 nt, Artificial Seqence
  Synthetic siRNA sense strand against b2GPI
cccggagcuuccugucugugc

SEQ ID NO: 451 - RNA, 21 nt, Artificial Seqence
  Synthetic siRNA sense strand against b2GPI
ccggagcuuccugucugugcu

SEQ ID NO: 452 - RNA, 21 nt, Artificial Seqence
  Synthetic siRNA sense strand against b2GPI
cggagcuuccugucugugcuc

SEQ ID NO: 453 - RNA, 21 nt, Artificial Seqence
  Synthetic siRNA sense strand against b2GPI
ggagcuuccugucugugcucc

SEQ ID NO: 454 - RNA, 21 nt, Artificial Seqence
  Synthetic siRNA sense strand against b2GPI
gagcuuccugucugugcuccc

SEQ ID NO: 455 - RNA, 21 nt, Artificial Seqence
  Synthetic siRNA sense strand against b2GPI
agcuuccugucugugcuccca

SEQ ID NO: 456 - RNA, 21 nt, Artificial Seqence
  Synthetic siRNA sense strand against b2GPI
gcuuccugucugugcucccau

SEQ ID NO: 457 - RNA, 21 nt, Artificial Seqence
  Synthetic siRNA sense strand against b2GPI
cuuccugucugugcucccauc

SEQ ID NO: 458 - RNA, 21 nt, Artificial Seqence
  Synthetic siRNA sense strand against b2GPI
uuccugucugugcucccauca

SEQ ID NO: 459 - RNA, 21 nt, Artificial Seqence
  Synthetic siRNA sense strand against b2GPI
uccugucugugcucccaucau

SEQ ID NO: 460 - RNA, 21 nt, Artificial Seqence
  Synthetic siRNA sense strand against b2GPI
ccugucugugcucccaucauc

SEQ ID NO: 461 - RNA, 21 nt, Artificial Seqence
  Synthetic siRNA sense strand against b2GPI
cugucugugcucccaucaucu

SEQ ID NO: 462 - RNA, 21 nt, Artificial Seqence
  Synthetic siRNA sense strand against b2GPI
ugucugugcucccaucaucug

SEQ ID NO: 463 - RNA, 21 nt, Artificial Seqence
  Synthetic siRNA sense strand against b2GPI
gucugugcucccaucaucugc

SEQ ID NO: 464 - RNA, 21 nt, Artificial Seqence
  Synthetic siRNA sense strand against b2GPI
ucugugcucccaucaucugcc

SEQ ID NO: 465 - RNA, 21 nt, Artificial Seqence
  Synthetic siRNA sense strand against b2GPI
cugugcucccaucaucugccc

SEQ ID NO: 466 - RNA, 21 nt, Artificial Seqence
  Synthetic siRNA sense strand against b2GPI
ugugcucccaucaucugcccu

SEQ ID NO: 467 - RNA, 21 nt, Artificial Seqence
  Synthetic siRNA sense strand against b2GPI
gugcucccaucaucugcccuc

SEQ ID NO: 468 - RNA, 21 nt, Artificial Seqence
  Synthetic siRNA sense strand against b2GPI
ugcucccaucaucugcccucc

SEQ ID NO: 469 - RNA, 21 nt, Artificial Seqence
  Synthetic siRNA sense strand against b2GPI
gcucccaucaucugcccucca

SEQ ID NO: 470 - RNA, 21 nt, Artificial Seqence
  Synthetic siRNA sense strand against b2GPI
cucccaucaucugcccuccac

SEQ ID NO: 471 - RNA, 21 nt, Artificial Seqence
  Synthetic siRNA sense strand against b2GPI
ucccaucaucugcccuccacc

SEQ ID NO: 472 - RNA, 21 nt, Artificial Seqence
  Synthetic siRNA sense strand against b2GPI
cccaucaucugcccuccacca

SEQ ID NO: 473 - RNA, 21 nt, Artificial Seqence
  Synthetic siRNA sense strand against b2GPI
ccaucaucugcccuccaccau

SEQ ID NO: 474 - RNA, 21 nt, Artificial Seqence
  Synthetic siRNA sense strand against b2GPI
caucaucugcccuccaccauc

SEQ ID NO: 475 - RNA, 21 nt, Artificial Seqence
  Synthetic siRNA sense strand against b2GPI
aucaucugcccuccaccaucc

SEQ ID NO: 476 - RNA, 21 nt, Artificial Seqence
  Synthetic siRNA sense strand against b2GPI
ucaucugcccuccaccaucca

SEQ ID NO: 477 - RNA, 21 nt, Artificial Seqence
  Synthetic siRNA sense strand against b2GPI
caucugcccuccaccauccau

SEQ ID NO: 478 - RNA, 21 nt, Artificial Seqence
  Synthetic siRNA sense strand against b2GPI
aucugcccuccaccauccaua

SEQ ID NO: 479 - RNA, 21 nt, Artificial Seqence
  Synthetic siRNA sense strand against b2GPI
ucugcccuccaccauccauac

SEQ ID NO: 480 - RNA, 21 nt, Artificial Seqence
  Synthetic siRNA sense strand against b2GPI
cugcccuccaccauccauacc

SEQ ID NO: 481 - RNA, 21 nt, Artificial Seqence
  Synthetic siRNA sense strand against b2GPI
ugcccuccaccauccauaccu

SEQ ID NO: 482 - RNA, 21 nt, Artificial Seqence
  Synthetic siRNA sense strand against b2GPI
gcccuccaccauccauaccua

SEQ ID NO: 483 - RNA, 21 nt, Artificial Seqence
  Synthetic siRNA sense strand against b2GPI
cccuccaccauccauaccuac

SEQ ID NO: 484 - RNA, 21 nt, Artificial Seqence
  Synthetic siRNA sense strand against b2GPI
ccuccaccauccauaccuacg

SEQ ID NO: 485 - RNA, 21 nt, Artificial Seqence
  Synthetic siRNA sense strand against b2GPI
cuccaccauccauaccuacgu

SEQ ID NO: 486 - RNA, 21 nt, Artificial Seqence
  Synthetic siRNA sense strand against b2GPI
uccaccauccauaccuacguu

SEQ ID NO: 487 - RNA, 21 nt, Artificial Seqence
  Synthetic siRNA sense strand against b2GPI
ccaccauccauaccuacguuu

SEQ ID NO: 488 - RNA, 21 nt, Artificial Seqence
  Synthetic siRNA sense strand against b2GPI
caccauccauaccuacguuug

SEQ ID NO: 489 - RNA, 21 nt, Artificial Seqence
  Synthetic siRNA sense strand against b2GPI
accauccauaccuacguuugc

SEQ ID NO: 490 - RNA, 21 nt, Artificial Seqence
  Synthetic siRNA sense strand against b2GPI
ccauccauaccuacguuugca

SEQ ID NO: 491 - RNA, 21 nt, Artificial Seqence
  Synthetic siRNA sense strand against b2GPI
cauccauaccuacguuugcaa

SEQ ID NO: 492 - RNA, 21 nt, Artificial Seqence
  Synthetic siRNA sense strand against b2GPI
auccauaccuacguuugcaac

SEQ ID NO: 493 - RNA, 21 nt, Artificial Seqence
  Synthetic siRNA sense strand against b2GPI
uccauaccuacguuugcaaca

SEQ ID NO: 494 - RNA, 21 nt, Artificial Seqence
  Synthetic siRNA sense strand against b2GPI
ccauaccuacguuugcaacac

SEQ ID NO: 495 - RNA, 21 nt, Artificial Seqence
  Synthetic siRNA sense strand against b2GPI
cauaccuacguuugcaacacu

SEQ ID NO: 496 - RNA, 21 nt, Artificial Seqence
  Synthetic siRNA sense strand against b2GPI
auaccuacguuugcaacacuu

SEQ ID NO: 497 - RNA, 21 nt, Artificial Seqence
  Synthetic siRNA sense strand against b2GPI
uaccuacguuugcaacacuuc

SEQ ID NO: 498 - RNA, 21 nt, Artificial Seqence
  Synthetic siRNA sense strand against b2GPI
accuacguuugcaacacuucg

SEQ ID NO: 499 - RNA, 21 nt, Artificial Seqence
  Synthetic siRNA sense strand against b2GPI
ccuacguuugcaacacuucgu

SEQ ID NO: 500 - RNA, 21 nt, Artificial Seqence
  Synthetic siRNA sense strand against b2GPI
cuacguuugcaacacuucgug

SEQ ID NO: 501 - RNA, 21 nt, Artificial Seqence
  Synthetic siRNA sense strand against b2GPI
uacguuugcaacacuucgugu

SEQ ID NO: 502 - RNA, 21 nt, Artificial Seqence
  Synthetic siRNA sense strand against b2GPI
acguuugcaacacuucguguu

SEQ ID NO: 503 - RNA, 21 nt, Artificial Seqence
  Synthetic siRNA sense strand against b2GPI
cguuugcaacacuucguguuu

SEQ ID NO: 504 - RNA, 21 nt, Artificial Seqence
  Synthetic siRNA sense strand against b2GPI
guuugcaacacuucguguuua

SEQ ID NO: 505 - RNA, 21 nt, Artificial Seqence
  Synthetic siRNA sense strand against b2GPI
uuugcaacacuucguguuuau

SEQ ID NO: 506 - RNA, 21 nt, Artificial Seqence
  Synthetic siRNA sense strand against b2GPI
uugcaacacuucguguuuaua

SEQ ID NO: 507 - RNA, 21 nt, Artificial Seqence
  Synthetic siRNA sense strand against b2GPI
ugcaacacuucguguuuauaa

SEQ ID NO: 508 - RNA, 21 nt, Artificial Seqence
  Synthetic siRNA sense strand against b2GPI
gcaacacuucguguuuauaag

SEQ ID NO: 509 - RNA, 21 nt, Artificial Seqence
  Synthetic siRNA sense strand against b2GPI
caacacuucguguuuauaagc

SEQ ID NO: 510 - RNA, 21 nt, Artificial Seqence
  Synthetic siRNA sense strand against b2GPI
aacacuucguguuuauaagcc

SEQ ID NO: 511 - RNA, 21 nt, Artificial Seqence
  Synthetic siRNA sense strand against b2GPI
acacuucguguuuauaagcca

SEQ ID NO: 512 - RNA, 21 nt, Artificial Seqence
  Synthetic siRNA sense strand against b2GPI
cacuucguguuuauaagccau

SEQ ID NO: 513 - RNA, 21 nt, Artificial Seqence
  Synthetic siRNA sense strand against b2GPI
acuucguguuuauaagccauc

SEQ ID NO: 514 - RNA, 21 nt, Artificial Seqence
  Synthetic siRNA sense strand against b2GPI
cuucguguuuauaagccauca

SEQ ID NO: 515 - RNA, 21 nt, Artificial Seqence
  Synthetic siRNA sense strand against b2GPI
uucguguuuauaagccaucag

SEQ ID NO: 516 - RNA, 21 nt, Artificial Seqence
  Synthetic siRNA sense strand against b2GPI
ucguguuuauaagccaucagc

SEQ ID NO: 517 - RNA, 21 nt, Artificial Seqence
  Synthetic siRNA sense strand against b2GPI
cguguuuauaagccaucagcu

SEQ ID NO: 518 - RNA, 21 nt, Artificial Seqence
  Synthetic siRNA sense strand against b2GPI
guguuuauaagccaucagcug

SEQ ID NO: 519 - RNA, 21 nt, Artificial Seqence
  Synthetic siRNA sense strand against b2GPI
uguuuauaagccaucagcugg

SEQ ID NO: 520 - RNA, 21 nt, Artificial Seqence
  Synthetic siRNA sense strand against b2GPI
guuuauaagccaucagcugga

SEQ ID NO: 521 - RNA, 21 nt, Artificial Seqence
  Synthetic siRNA sense strand against b2GPI
uuuauaagccaucagcuggaa

SEQ ID NO: 522 - RNA, 21 nt, Artificial Seqence
  Synthetic siRNA sense strand against b2GPI
uuauaagccaucagcuggaaa

SEQ ID NO: 523 - RNA, 21 nt, Artificial Seqence
  Synthetic siRNA sense strand against b2GPI
uauaagccaucagcuggaaac

SEQ ID NO: 524 - RNA, 21 nt, Artificial Seqence
  Synthetic siRNA sense strand against b2GPI
auaagccaucagcuggaaaca

SEQ ID NO: 525 - RNA, 21 nt, Artificial Seqence
  Synthetic siRNA sense strand against b2GPI
uaagccaucagcuggaaacaa

SEQ ID NO: 526 - RNA, 21 nt, Artificial Seqence
  Synthetic siRNA sense strand against b2GPI
aagccaucagcuggaaacaau

SEQ ID NO: 527 - RNA, 21 nt, Artificial Seqence
  Synthetic siRNA sense strand against b2GPI
agccaucagcuggaaacaauu

SEQ ID NO: 528 - RNA, 21 nt, Artificial Seqence
  Synthetic siRNA sense strand against b2GPI
gccaucagcuggaaacaauuc

SEQ ID NO: 529 - RNA, 21 nt, Artificial Seqence
  Synthetic siRNA sense strand against b2GPI
ccaucagcuggaaacaauucc

SEQ ID NO: 530 - RNA, 21 nt, Artificial Seqence
  Synthetic siRNA sense strand against b2GPI
caucagcuggaaacaauuccc

SEQ ID NO: 531 - RNA, 21 nt, Artificial Seqence
  Synthetic siRNA sense strand against b2GPI
aucagcuggaaacaauucccu

SEQ ID NO: 532 - RNA, 21 nt, Artificial Seqence
  Synthetic siRNA sense strand against b2GPI
ucagcuggaaacaauucccuc

SEQ ID NO: 533 - RNA, 21 nt, Artificial Seqence
  Synthetic siRNA sense strand against b2GPI
cagcuggaaacaauucccucu

SEQ ID NO: 534 - RNA, 21 nt, Artificial Seqence
  Synthetic siRNA sense strand against b2GPI
agcuggaaacaauucccucua

SEQ ID NO: 535 - RNA, 21 nt, Artificial Seqence
  Synthetic siRNA sense strand against b2GPI
gcuggaaacaauucccucuau

SEQ ID NO: 536 - RNA, 21 nt, Artificial Seqence
  Synthetic siRNA sense strand against b2GPI
cuggaaacaauucccucuauc

SEQ ID NO: 537 - RNA, 21 nt, Artificial Seqence
  Synthetic siRNA sense strand against b2GPI
uggaaacaauucccucuaucg

SEQ ID NO: 538 - RNA, 21 nt, Artificial Seqence
  Synthetic siRNA sense strand against b2GPI
ggaaacaauucccucuaucgg

SEQ ID NO: 539 - RNA, 21 nt, Artificial Seqence
  Synthetic siRNA sense strand against b2GPI
gaaacaauucccucuaucggg

SEQ ID NO: 540 - RNA, 21 nt, Artificial Seqence
  Synthetic siRNA sense strand against b2GPI
aaacaauucccucuaucggga

SEQ ID NO: 541 - RNA, 21 nt, Artificial Seqence
  Synthetic siRNA sense strand against b2GPI
aacaauucccucuaucgggac

SEQ ID NO: 542 - RNA, 21 nt, Artificial Seqence
  Synthetic siRNA sense strand against b2GPI
acaauucccucuaucgggaca

SEQ ID NO: 543 - RNA, 21 nt, Artificial Seqence
  Synthetic siRNA sense strand against b2GPI
caauucccucuaucgggacac

SEQ ID NO: 544 - RNA, 21 nt, Artificial Seqence
  Synthetic siRNA sense strand against b2GPI
aauucccucuaucgggacaca

SEQ ID NO: 545 - RNA, 21 nt, Artificial Seqence
  Synthetic siRNA sense strand against b2GPI
auucccucuaucgggacacag

SEQ ID NO: 546 - RNA, 21 nt, Artificial Seqence
  Synthetic siRNA sense strand against b2GPI
uucccucuaucgggacacagc

SEQ ID NO: 547 - RNA, 21 nt, Artificial Seqence
  Synthetic siRNA sense strand against b2GPI
ucccucuaucgggacacagca

SEQ ID NO: 548 - RNA, 21 nt, Artificial Seqence
  Synthetic siRNA sense strand against b2GPI
cccucuaucgggacacagcag

SEQ ID NO: 549 - RNA, 21 nt, Artificial Seqence
  Synthetic siRNA sense strand against b2GPI
ccucuaucgggacacagcagu

SEQ ID NO: 550 - RNA, 21 nt, Artificial Seqence
  Synthetic siRNA sense strand against b2GPI
cucuaucgggacacagcaguu

SEQ ID NO: 551 - RNA, 21 nt, Artificial Seqence
  Synthetic siRNA sense strand against b2GPI
ucuaucgggacacagcaguuu

SEQ ID NO: 552 - RNA, 21 nt, Artificial Seqence
  Synthetic siRNA sense strand against b2GPI
cuaucgggacacagcaguuuu

SEQ ID NO: 553 - RNA, 21 nt, Artificial Seqence
  Synthetic siRNA sense strand against b2GPI
uaucgggacacagcaguuuuu

SEQ ID NO: 554 - RNA, 21 nt, Artificial Seqence
  Synthetic siRNA sense strand against b2GPI
aucgggacacagcaguuuuug

SEQ ID NO: 555 - RNA, 21 nt, Artificial Seqence
  Synthetic siRNA sense strand against b2GPI
ucgggacacagcaguuuuuga

SEQ ID NO: 556 - RNA, 21 nt, Artificial Seqence
  Synthetic siRNA sense strand against b2GPI
cgggacacagcaguuuuugaa

SEQ ID NO: 557 - RNA, 21 nt, Artificial Seqence
  Synthetic siRNA sense strand against b2GPI
gggacacagcaguuuuugaau

SEQ ID NO: 558 - RNA, 21 nt, Artificial Seqence
  Synthetic siRNA sense strand against b2GPI
ggacacagcaguuuuugaaug

SEQ ID NO: 559 - RNA, 21 nt, Artificial Seqence
  Synthetic siRNA sense strand against b2GPI
gacacagcaguuuuugaaugu

SEQ ID NO: 560 - RNA, 21 nt, Artificial Seqence
  Synthetic siRNA sense strand against b2GPI
acacagcaguuuuugaauguu

SEQ ID NO: 561 - RNA, 21 nt, Artificial Seqence
  Synthetic siRNA sense strand against b2GPI
cacagcaguuuuugaauguuu

SEQ ID NO: 562 - RNA, 21 nt, Artificial Seqence
  Synthetic siRNA sense strand against b2GPI
acagcaguuuuugaauguuug

SEQ ID NO: 563 - RNA, 21 nt, Artificial Seqence
  Synthetic siRNA sense strand against b2GPI
cagcaguuuuugaauguuugc

SEQ ID NO: 564 - RNA, 21 nt, Artificial Seqence
  Synthetic siRNA sense strand against b2GPI
agcaguuuuugaauguuugcc

SEQ ID NO: 565 - RNA, 21 nt, Artificial Seqence
  Synthetic siRNA sense strand against b2GPI
gcaguuuuugaauguuugcca

SEQ ID NO: 566 - RNA, 21 nt, Artificial Seqence
  Synthetic siRNA sense strand against b2GPI
caguuuuugaauguuugccac

SEQ ID NO: 567 - RNA, 21 nt, Artificial Seqence
  Synthetic siRNA sense strand against b2GPI
aguuuuugaauguuugccaca

SEQ ID NO: 568 - RNA, 21 nt, Artificial Seqence
  Synthetic siRNA sense strand against b2GPI
guuuuugaauguuugccacaa

SEQ ID NO: 569 - RNA, 21 nt, Artificial Seqence
  Synthetic siRNA sense strand against b2GPI
uuuuugaauguuugccacaac

SEQ ID NO: 570 - RNA, 21 nt, Artificial Seqence
  Synthetic siRNA sense strand against b2GPI
uuuugaauguuugccacaaca

SEQ ID NO: 571 - RNA, 21 nt, Artificial Seqence
  Synthetic siRNA sense strand against b2GPI
uuugaauguuugccacaacau

SEQ ID NO: 572 - RNA, 21 nt, Artificial Seqence
  Synthetic siRNA sense strand against b2GPI
uugaauguuugccacaacaug

SEQ ID NO: 573 - RNA, 21 nt, Artificial Seqence
  Synthetic siRNA sense strand against b2GPI
ugaauguuugccacaacaugc

SEQ ID NO: 574 - RNA, 21 nt, Artificial Seqence
  Synthetic siRNA sense strand against b2GPI
gaauguuugccacaacaugcg

SEQ ID NO: 575 - RNA, 21 nt, Artificial Seqence
  Synthetic siRNA sense strand against b2GPI
aauguuugccacaacaugcga

SEQ ID NO: 576 - RNA, 21 nt, Artificial Seqence
  Synthetic siRNA sense strand against b2GPI
auguuugccacaacaugcgau

SEQ ID NO: 577 - RNA, 21 nt, Artificial Seqence
  Synthetic siRNA sense strand against b2GPI
uguuugccacaacaugcgaug

SEQ ID NO: 578 - RNA, 21 nt, Artificial Seqence
  Synthetic siRNA sense strand against b2GPI
guuugccacaacaugcgaugu

SEQ ID NO: 579 - RNA, 21 nt, Artificial Seqence
  Synthetic siRNA sense strand against b2GPI
uuugccacaacaugcgauguu

SEQ ID NO: 580 - RNA, 21 nt, Artificial Seqence
  Synthetic siRNA sense strand against b2GPI
uugccacaacaugcgauguuu

SEQ ID NO: 581 - RNA, 21 nt, Artificial Seqence
  Synthetic siRNA sense strand against b2GPI
ugccacaacaugcgauguuug

SEQ ID NO: 582 - RNA, 21 nt, Artificial Seqence
  Synthetic siRNA sense strand against b2GPI
gccacaacaugcgauguuugg

SEQ ID NO: 583 - RNA, 21 nt, Artificial Seqence
  Synthetic siRNA sense strand against b2GPI
ccacaacaugcgauguuugga

SEQ ID NO: 584 - RNA, 21 nt, Artificial Seqence
  Synthetic siRNA sense strand against b2GPI
cacaacaugcgauguuuggaa

SEQ ID NO: 585 - RNA, 21 nt, Artificial Seqence
  Synthetic siRNA sense strand against b2GPI
acaacaugcgauguuuggaaa

SEQ ID NO: 586 - RNA, 21 nt, Artificial Seqence
  Synthetic siRNA sense strand against b2GPI
caacaugcgauguuuggaaau

SEQ ID NO: 587 - RNA, 21 nt, Artificial Seqence
  Synthetic siRNA sense strand against b2GPI
aacaugcgauguuuggaaaug

SEQ ID NO: 588 - RNA, 21 nt, Artificial Seqence
  Synthetic siRNA sense strand against b2GPI
acaugcgauguuuggaaauga

SEQ ID NO: 589 - RNA, 21 nt, Artificial Seqence
  Synthetic siRNA sense strand against b2GPI
caugcgauguuuggaaaugau

SEQ ID NO: 590 - RNA, 21 nt, Artificial Seqence
  Synthetic siRNA sense strand against b2GPI
augcgauguuuggaaaugaua

SEQ ID NO: 591 - RNA, 21 nt, Artificial Seqence
  Synthetic siRNA sense strand against b2GPI
ugcgauguuuggaaaugauac

SEQ ID NO: 592 - RNA, 21 nt, Artificial Seqence
  Synthetic siRNA sense strand against b2GPI
gcgauguuuggaaaugauaca

SEQ ID NO: 593 - RNA, 21 nt, Artificial Seqence
  Synthetic siRNA sense strand against b2GPI
cgauguuuggaaaugauacaa

SEQ ID NO: 594 - RNA, 21 nt, Artificial Seqence
  Synthetic siRNA sense strand against b2GPI
gauguuuggaaaugauacaau

SEQ ID NO: 595 - RNA, 21 nt, Artificial Seqence
  Synthetic siRNA sense strand against b2GPI
auguuuggaaaugauacaauu

SEQ ID NO: 596 - RNA, 21 nt, Artificial Seqence
  Synthetic siRNA sense strand against b2GPI
uguuuggaaaugauacaauua

SEQ ID NO: 597 - RNA, 21 nt, Artificial Seqence
  Synthetic siRNA sense strand against b2GPI
guuuggaaaugauacaauuac

SEQ ID NO: 598 - RNA, 21 nt, Artificial Seqence
  Synthetic siRNA sense strand against b2GPI
uuuggaaaugauacaauuacc

SEQ ID NO: 599 - RNA, 21 nt, Artificial Seqence
  Synthetic siRNA sense strand against b2GPI
uuggaaaugauacaauuaccu

SEQ ID NO: 600 - RNA, 21 nt, Artificial Seqence
  Synthetic siRNA sense strand against b2GPI
uggaaaugauacaauuaccug

SEQ ID NO: 601 - RNA, 21 nt, Artificial Seqence
  Synthetic siRNA sense strand against b2GPI
ggaaaugauacaauuaccugc

SEQ ID NO: 602 - RNA, 21 nt, Artificial Seqence
  Synthetic siRNA sense strand against b2GPI
gaaaugauacaauuaccugca

SEQ ID NO: 603 - RNA, 21 nt, Artificial Seqence
  Synthetic siRNA sense strand against b2GPI
aaaugauacaauuaccugcac

SEQ ID NO: 604 - RNA, 21 nt, Artificial Seqence
  Synthetic siRNA sense strand against b2GPI
aaugauacaauuaccugcacg

SEQ ID NO: 605 - RNA, 21 nt, Artificial Seqence
  Synthetic siRNA sense strand against b2GPI
augauacaauuaccugcacga

SEQ ID NO: 606 - RNA, 21 nt, Artificial Seqence
  Synthetic siRNA sense strand against b2GPI
ugauacaauuaccugcacgac

SEQ ID NO: 607 - RNA, 21 nt, Artificial Seqence
  Synthetic siRNA sense strand against b2GPI
gauacaauuaccugcacgaca

SEQ ID NO: 608 - RNA, 21 nt, Artificial Seqence
  Synthetic siRNA sense strand against b2GPI
auacaauuaccugcacgacac

SEQ ID NO: 609 - RNA, 21 nt, Artificial Seqence
  Synthetic siRNA sense strand against b2GPI
uacaauuaccugcacgacaca

SEQ ID NO: 610 - RNA, 21 nt, Artificial Seqence
  Synthetic siRNA sense strand against b2GPI
acaauuaccugcacgacacau

SEQ ID NO: 611 - RNA, 21 nt, Artificial Seqence
  Synthetic siRNA sense strand against b2GPI
caauuaccugcacgacacaug

SEQ ID NO: 612 - RNA, 21 nt, Artificial Seqence
  Synthetic siRNA sense strand against b2GPI
aauuaccugcacgacacaugg

SEQ ID NO: 613 - RNA, 21 nt, Artificial Seqence
  Synthetic siRNA sense strand against b2GPI
auuaccugcacgacacaugga

SEQ ID NO: 614 - RNA, 21 nt, Artificial Seqence
  Synthetic siRNA sense strand against b2GPI
uuaccugcacgacacauggaa

SEQ ID NO: 615 - RNA, 21 nt, Artificial Seqence
  Synthetic siRNA sense strand against b2GPI
uaccugcacgacacauggaaa

SEQ ID NO: 616 - RNA, 21 nt, Artificial Seqence
  Synthetic siRNA sense strand against b2GPI
accugcacgacacauggaaau

SEQ ID NO: 617 - RNA, 21 nt, Artificial Seqence
  Synthetic siRNA sense strand against b2GPI
ccugcacgacacauggaaauu

SEQ ID NO: 618 - RNA, 21 nt, Artificial Seqence
  Synthetic siRNA sense strand against b2GPI
cugcacgacacauggaaauug

SEQ ID NO: 619 - RNA, 21 nt, Artificial Seqence
  Synthetic siRNA sense strand against b2GPI
ugcacgacacauggaaauugg

SEQ ID NO: 620 - RNA, 21 nt, Artificial Seqence
  Synthetic siRNA sense strand against b2GPI
gcacgacacauggaaauugga

SEQ ID NO: 621 - RNA, 21 nt, Artificial Seqence
  Synthetic siRNA sense strand against b2GPI
cacgacacauggaaauuggac

SEQ ID NO: 622 - RNA, 21 nt, Artificial Seqence
  Synthetic siRNA sense strand against b2GPI
acgacacauggaaauuggacu

SEQ ID NO: 623 - RNA, 21 nt, Artificial Seqence
  Synthetic siRNA sense strand against b2GPI
cgacacauggaaauuggacua

SEQ ID NO: 624 - RNA, 21 nt, Artificial Seqence
  Synthetic siRNA sense strand against b2GPI
gacacauggaaauuggacuaa

SEQ ID NO: 625 - RNA, 21 nt, Artificial Seqence
  Synthetic siRNA sense strand against b2GPI
acacauggaaauuggacuaaa

SEQ ID NO: 626 - RNA, 21 nt, Artificial Seqence
  Synthetic siRNA sense strand against b2GPI
cacauggaaauuggacuaaau

SEQ ID NO: 627 - RNA, 21 nt, Artificial Seqence
  Synthetic siRNA sense strand against b2GPI
acauggaaauuggacuaaauu

SEQ ID NO: 628 - RNA, 21 nt, Artificial Seqence
  Synthetic siRNA sense strand against b2GPI
cauggaaauuggacuaaauua

SEQ ID NO: 629 - RNA, 21 nt, Artificial Seqence
  Synthetic siRNA sense strand against b2GPI
auggaaauuggacuaaauuac

SEQ ID NO: 630 - RNA, 21 nt, Artificial Seqence
  Synthetic siRNA sense strand against b2GPI
uggaaauuggacuaaauuacc

SEQ ID NO: 631 - RNA, 21 nt, Artificial Seqence
  Synthetic siRNA sense strand against b2GPI
ggaaauuggacuaaauuacca

SEQ ID NO: 632 - RNA, 21 nt, Artificial Seqence
  Synthetic siRNA sense strand against b2GPI
gaaauuggacuaaauuaccag

SEQ ID NO: 633 - RNA, 21 nt, Artificial Seqence
  Synthetic siRNA sense strand against b2GPI
aaauuggacuaaauuaccaga

SEQ ID NO: 634 - RNA, 21 nt, Artificial Seqence
  Synthetic siRNA sense strand against b2GPI
aauuggacuaaauuaccagaa

SEQ ID NO: 635 - RNA, 21 nt, Artificial Seqence
  Synthetic siRNA sense strand against b2GPI
auuggacuaaauuaccagaau

SEQ ID NO: 636 - RNA, 21 nt, Artificial Seqence
  Synthetic siRNA sense strand against b2GPI
uuggacuaaauuaccagaaug

SEQ ID NO: 637 - RNA, 21 nt, Artificial Seqence
  Synthetic siRNA sense strand against b2GPI
uggacuaaauuaccagaaugc

SEQ ID NO: 638 - RNA, 21 nt, Artificial Seqence
  Synthetic siRNA sense strand against b2GPI
ggacuaaauuaccagaaugca

SEQ ID NO: 639 - RNA, 21 nt, Artificial Seqence
  Synthetic siRNA sense strand against b2GPI
gacuaaauuaccagaaugcag

SEQ ID NO: 640 - RNA, 21 nt, Artificial Seqence
  Synthetic siRNA sense strand against b2GPI
acuaaauuaccagaaugcagg

SEQ ID NO: 641 - RNA, 21 nt, Artificial Seqence
  Synthetic siRNA sense strand against b2GPI
cuaaauuaccagaaugcaggg

SEQ ID NO: 642 - RNA, 21 nt, Artificial Seqence
  Synthetic siRNA sense strand against b2GPI
uaaauuaccagaaugcaggga

SEQ ID NO: 643 - RNA, 21 nt, Artificial Seqence
  Synthetic siRNA sense strand against b2GPI
aaauuaccagaaugcagggaa

SEQ ID NO: 644 - RNA, 21 nt, Artificial Seqence
  Synthetic siRNA sense strand against b2GPI
aauuaccagaaugcagggaag

SEQ ID NO: 645 - RNA, 21 nt, Artificial Seqence
  Synthetic siRNA sense strand against b2GPI
auuaccagaaugcagggaagu

SEQ ID NO: 646 - RNA, 21 nt, Artificial Seqence
  Synthetic siRNA sense strand against b2GPI
uuaccagaaugcagggaagua

SEQ ID NO: 647 - RNA, 21 nt, Artificial Seqence
  Synthetic siRNA sense strand against b2GPI
uaccagaaugcagggaaguaa

SEQ ID NO: 648 - RNA, 21 nt, Artificial Seqence
  Synthetic siRNA sense strand against b2GPI
accagaaugcagggaaguaaa

SEQ ID NO: 649 - RNA, 21 nt, Artificial Seqence
  Synthetic siRNA sense strand against b2GPI
ccagaaugcagggaaguaaaa

SEQ ID NO: 650 - RNA, 21 nt, Artificial Seqence
  Synthetic siRNA sense strand against b2GPI
cagaaugcagggaaguaaaau

SEQ ID NO: 651 - RNA, 21 nt, Artificial Seqence
  Synthetic siRNA sense strand against b2GPI
agaaugcagggaaguaaaaug

SEQ ID NO: 652 - RNA, 21 nt, Artificial Seqence
  Synthetic siRNA sense strand against b2GPI
gaaugcagggaaguaaaaugc

SEQ ID NO: 653 - RNA, 21 nt, Artificial Seqence
  Synthetic siRNA sense strand against b2GPI
aaugcagggaaguaaaaugcc

SEQ ID NO: 654 - RNA, 21 nt, Artificial Seqence
  Synthetic siRNA sense strand against b2GPI
augcagggaaguaaaaugccc

SEQ ID NO: 655 - RNA, 21 nt, Artificial Seqence
  Synthetic siRNA sense strand against b2GPI
ugcagggaaguaaaaugccca

SEQ ID NO: 656 - RNA, 21 nt, Artificial Seqence
  Synthetic siRNA sense strand against b2GPI
gcagggaaguaaaaugcccau

SEQ ID NO: 657 - RNA, 21 nt, Artificial Seqence
  Synthetic siRNA sense strand against b2GPI
cagggaaguaaaaugcccauu

SEQ ID NO: 658 - RNA, 21 nt, Artificial Seqence
  Synthetic siRNA sense strand against b2GPI
agggaaguaaaaugcccauuc

SEQ ID NO: 659 - RNA, 21 nt, Artificial Seqence
  Synthetic siRNA sense strand against b2GPI
gggaaguaaaaugcccauucc

SEQ ID NO: 660 - RNA, 21 nt, Artificial Seqence
  Synthetic siRNA sense strand against b2GPI
ggaaguaaaaugcccauuccc

SEQ ID NO: 661 - RNA, 21 nt, Artificial Seqence
  Synthetic siRNA sense strand against b2GPI
gaaguaaaaugcccauuccca

SEQ ID NO: 662 - RNA, 21 nt, Artificial Seqence
  Synthetic siRNA sense strand against b2GPI
aaguaaaaugcccauucccau

SEQ ID NO: 663 - RNA, 21 nt, Artificial Seqence
  Synthetic siRNA sense strand against b2GPI
aguaaaaugcccauucccauc

SEQ ID NO: 664 - RNA, 21 nt, Artificial Seqence
  Synthetic siRNA sense strand against b2GPI
guaaaaugcccauucccauca

SEQ ID NO: 665 - RNA, 21 nt, Artificial Seqence
  Synthetic siRNA sense strand against b2GPI
uaaaaugcccauucccaucaa

SEQ ID NO: 666 - RNA, 21 nt, Artificial Seqence
  Synthetic siRNA sense strand against b2GPI
aaaaugcccauucccaucaag

SEQ ID NO: 667 - RNA, 21 nt, Artificial Seqence
  Synthetic siRNA sense strand against b2GPI
aaaugcccauucccaucaaga

SEQ ID NO: 668 - RNA, 21 nt, Artificial Seqence
  Synthetic siRNA sense strand against b2GPI
aaugcccauucccaucaagac

SEQ ID NO: 669 - RNA, 21 nt, Artificial Seqence
  Synthetic siRNA sense strand against b2GPI
augcccauucccaucaagacc

SEQ ID NO: 670 - RNA, 21 nt, Artificial Seqence
  Synthetic siRNA sense strand against b2GPI
ugcccauucccaucaagacca

SEQ ID NO: 671 - RNA, 21 nt, Artificial Seqence
  Synthetic siRNA sense strand against b2GPI
gcccauucccaucaagaccag

SEQ ID NO: 672 - RNA, 21 nt, Artificial Seqence
  Synthetic siRNA sense strand against b2GPI
cccauucccaucaagaccaga

SEQ ID NO: 673 - RNA, 21 nt, Artificial Seqence
  Synthetic siRNA sense strand against b2GPI
ccauucccaucaagaccagac

SEQ ID NO: 674 - RNA, 21 nt, Artificial Seqence
  Synthetic siRNA sense strand against b2GPI
cauucccaucaagaccagaca

SEQ ID NO: 675 - RNA, 21 nt, Artificial Seqence
  Synthetic siRNA sense strand against b2GPI
auucccaucaagaccagacaa

SEQ ID NO: 676 - RNA, 21 nt, Artificial Seqence
  Synthetic siRNA sense strand against b2GPI
uucccaucaagaccagacaau

SEQ ID NO: 677 - RNA, 21 nt, Artificial Seqence
  Synthetic siRNA sense strand against b2GPI
ucccaucaagaccagacaaug

SEQ ID NO: 678 - RNA, 21 nt, Artificial Seqence
  Synthetic siRNA sense strand against b2GPI
cccaucaagaccagacaaugg

SEQ ID NO: 679 - RNA, 21 nt, Artificial Seqence
  Synthetic siRNA sense strand against b2GPI
ccaucaagaccagacaaugga

SEQ ID NO: 680 - RNA, 21 nt, Artificial Seqence
  Synthetic siRNA sense strand against b2GPI
caucaagaccagacaauggau

SEQ ID NO: 681 - RNA, 21 nt, Artificial Seqence
  Synthetic siRNA sense strand against b2GPI
aucaagaccagacaauggauu

SEQ ID NO: 682 - RNA, 21 nt, Artificial Seqence
  Synthetic siRNA sense strand against b2GPI
ucaagaccagacaauggauuu

SEQ ID NO: 683 - RNA, 21 nt, Artificial Seqence
  Synthetic siRNA sense strand against b2GPI
caagaccagacaauggauuug

SEQ ID NO: 684 - RNA, 21 nt, Artificial Seqence
  Synthetic siRNA sense strand against b2GPI
aagaccagacaauggauuugu

SEQ ID NO: 685 - RNA, 21 nt, Artificial Seqence
  Synthetic siRNA sense strand against b2GPI
agaccagacaauggauuugug

SEQ ID NO: 686 - RNA, 21 nt, Artificial Seqence
  Synthetic siRNA sense strand against b2GPI
gaccagacaauggauuuguga

SEQ ID NO: 687 - RNA, 21 nt, Artificial Seqence
  Synthetic siRNA sense strand against b2GPI
accagacaauggauuugugaa

SEQ ID NO: 688 - RNA, 21 nt, Artificial Seqence
  Synthetic siRNA sense strand against b2GPI
ccagacaauggauuugugaac

SEQ ID NO: 689 - RNA, 21 nt, Artificial Seqence
  Synthetic siRNA sense strand against b2GPI
cagacaauggauuugugaacu

SEQ ID NO: 690 - RNA, 21 nt, Artificial Seqence
  Synthetic siRNA sense strand against b2GPI
agacaauggauuugugaacua

SEQ ID NO: 691 - RNA, 21 nt, Artificial Seqence
  Synthetic siRNA sense strand against b2GPI
gacaauggauuugugaacuau

SEQ ID NO: 692 - RNA, 21 nt, Artificial Seqence
  Synthetic siRNA sense strand against b2GPI
acaauggauuugugaacuauc

SEQ ID NO: 693 - RNA, 21 nt, Artificial Seqence
  Synthetic siRNA sense strand against b2GPI
caauggauuugugaacuaucc

SEQ ID NO: 694 - RNA, 21 nt, Artificial Seqence
  Synthetic siRNA sense strand against b2GPI
aauggauuugugaacuauccu

SEQ ID NO: 695 - RNA, 21 nt, Artificial Seqence
  Synthetic siRNA sense strand against b2GPI
auggauuugugaacuauccug

SEQ ID NO: 696 - RNA, 21 nt, Artificial Seqence
  Synthetic siRNA sense strand against b2GPI
uggauuugugaacuauccugc

SEQ ID NO: 697 - RNA, 21 nt, Artificial Seqence
  Synthetic siRNA sense strand against b2GPI
ggauuugugaacuauccugca

SEQ ID NO: 698 - RNA, 21 nt, Artificial Seqence
  Synthetic siRNA sense strand against b2GPI
gauuugugaacuauccugcaa

SEQ ID NO: 699 - RNA, 21 nt, Artificial Seqence
  Synthetic siRNA sense strand against b2GPI
auuugugaacuauccugcaaa

SEQ ID NO: 700 - RNA, 21 nt, Artificial Seqence
  Synthetic siRNA sense strand against b2GPI
uuugugaacuauccugcaaaa

SEQ ID NO: 701 - RNA, 21 nt, Artificial Seqence
  Synthetic siRNA sense strand against b2GPI
uugugaacuauccugcaaaac

SEQ ID NO: 702 - RNA, 21 nt, Artificial Seqence
  Synthetic siRNA sense strand against b2GPI
ugugaacuauccugcaaaacc

SEQ ID NO: 703 - RNA, 21 nt, Artificial Seqence
  Synthetic siRNA sense strand against b2GPI
gugaacuauccugcaaaacca

SEQ ID NO: 704 - RNA, 21 nt, Artificial Seqence
  Synthetic siRNA sense strand against b2GPI
ugaacuauccugcaaaaccaa

SEQ ID NO: 705 - RNA, 21 nt, Artificial Seqence
  Synthetic siRNA sense strand against b2GPI
gaacuauccugcaaaaccaac

SEQ ID NO: 706 - RNA, 21 nt, Artificial Seqence
  Synthetic siRNA sense strand against b2GPI
aacuauccugcaaaaccaaca

SEQ ID NO: 707 - RNA, 21 nt, Artificial Seqence
  Synthetic siRNA sense strand against b2GPI
acuauccugcaaaaccaacac

SEQ ID NO: 708 - RNA, 21 nt, Artificial Seqence
  Synthetic siRNA sense strand against b2GPI
cuauccugcaaaaccaacacu

SEQ ID NO: 709 - RNA, 21 nt, Artificial Seqence
  Synthetic siRNA sense strand against b2GPI
uauccugcaaaaccaacacuu

SEQ ID NO: 710 - RNA, 21 nt, Artificial Seqence
  Synthetic siRNA sense strand against b2GPI
auccugcaaaaccaacacuuu

SEQ ID NO: 711 - RNA, 21 nt, Artificial Seqence
  Synthetic siRNA sense strand against b2GPI
uccugcaaaaccaacacuuua

SEQ ID NO: 712 - RNA, 21 nt, Artificial Seqence
  Synthetic siRNA sense strand against b2GPI
ccugcaaaaccaacacuuuau

SEQ ID NO: 713 - RNA, 21 nt, Artificial Seqence
  Synthetic siRNA sense strand against b2GPI
cugcaaaaccaacacuuuauu

SEQ ID NO: 714 - RNA, 21 nt, Artificial Seqence
  Synthetic siRNA sense strand against b2GPI
ugcaaaaccaacacuuuauua

SEQ ID NO: 715 - RNA, 21 nt, Artificial Seqence
  Synthetic siRNA sense strand against b2GPI
gcaaaaccaacacuuuauuac

SEQ ID NO: 716 - RNA, 21 nt, Artificial Seqence
  Synthetic siRNA sense strand against b2GPI
caaaaccaacacuuuauuaca

SEQ ID NO: 717 - RNA, 21 nt, Artificial Seqence
  Synthetic siRNA sense strand against b2GPI
aaaaccaacacuuuauuacaa

SEQ ID NO: 718 - RNA, 21 nt, Artificial Seqence
  Synthetic siRNA sense strand against b2GPI
aaaccaacacuuuauuacaag

SEQ ID NO: 719 - RNA, 21 nt, Artificial Seqence
  Synthetic siRNA sense strand against b2GPI
aaccaacacuuuauuacaagg

SEQ ID NO: 720 - RNA, 21 nt, Artificial Seqence
  Synthetic siRNA sense strand against b2GPI
accaacacuuuauuacaagga

SEQ ID NO: 721 - RNA, 21 nt, Artificial Seqence
  Synthetic siRNA sense strand against b2GPI
ccaacacuuuauuacaaggau

SEQ ID NO: 722 - RNA, 21 nt, Artificial Seqence
  Synthetic siRNA sense strand against b2GPI
caacacuuuauuacaaggaua

SEQ ID NO: 723 - RNA, 21 nt, Artificial Seqence
  Synthetic siRNA sense strand against b2GPI
aacacuuuauuacaaggauaa

SEQ ID NO: 724 - RNA, 21 nt, Artificial Seqence
  Synthetic siRNA sense strand against b2GPI
acacuuuauuacaaggauaaa

SEQ ID NO: 725 - RNA, 21 nt, Artificial Seqence
  Synthetic siRNA sense strand against b2GPI
cacuuuauuacaaggauaaag

SEQ ID NO: 726 - RNA, 21 nt, Artificial Seqence
  Synthetic siRNA sense strand against b2GPI
acuuuauuacaaggauaaagc

SEQ ID NO: 727 - RNA, 21 nt, Artificial Seqence
  Synthetic siRNA sense strand against b2GPI
cuuuauuacaaggauaaagcc

SEQ ID NO: 728 - RNA, 21 nt, Artificial Seqence
  Synthetic siRNA sense strand against b2GPI
uuuauuacaaggauaaagcca

SEQ ID NO: 729 - RNA, 21 nt, Artificial Seqence
  Synthetic siRNA sense strand against b2GPI
uuauuacaaggauaaagccac

SEQ ID NO: 730 - RNA, 21 nt, Artificial Seqence
  Synthetic siRNA sense strand against b2GPI
uauuacaaggauaaagccaca

SEQ ID NO: 731 - RNA, 21 nt, Artificial Seqence
  Synthetic siRNA sense strand against b2GPI
auuacaaggauaaagccacau

SEQ ID NO: 732 - RNA, 21 nt, Artificial Seqence
  Synthetic siRNA sense strand against b2GPI
uuacaaggauaaagccacauu

SEQ ID NO: 733 - RNA, 21 nt, Artificial Seqence
  Synthetic siRNA sense strand against b2GPI
uacaaggauaaagccacauuu

SEQ ID NO: 734 - RNA, 21 nt, Artificial Seqence
  Synthetic siRNA sense strand against b2GPI
acaaggauaaagccacauuug

SEQ ID NO: 735 - RNA, 21 nt, Artificial Seqence
  Synthetic siRNA sense strand against b2GPI
caaggauaaagccacauuugg

SEQ ID NO: 736 - RNA, 21 nt, Artificial Seqence
  Synthetic siRNA sense strand against b2GPI
aaggauaaagccacauuuggc

SEQ ID NO: 737 - RNA, 21 nt, Artificial Seqence
  Synthetic siRNA sense strand against b2GPI
aggauaaagccacauuuggcu

SEQ ID NO: 738 - RNA, 21 nt, Artificial Seqence
  Synthetic siRNA sense strand against b2GPI
ggauaaagccacauuuggcug

SEQ ID NO: 739 - RNA, 21 nt, Artificial Seqence
  Synthetic siRNA sense strand against b2GPI
gauaaagccacauuuggcugc

SEQ ID NO: 740 - RNA, 21 nt, Artificial Seqence
  Synthetic siRNA sense strand against b2GPI
auaaagccacauuuggcugcc

SEQ ID NO: 741 - RNA, 21 nt, Artificial Seqence
  Synthetic siRNA sense strand against b2GPI
uaaagccacauuuggcugcca

SEQ ID NO: 742 - RNA, 21 nt, Artificial Seqence
  Synthetic siRNA sense strand against b2GPI
aaagccacauuuggcugccau

SEQ ID NO: 743 - RNA, 21 nt, Artificial Seqence
  Synthetic siRNA sense strand against b2GPI
aagccacauuuggcugccaug

SEQ ID NO: 744 - RNA, 21 nt, Artificial Seqence
  Synthetic siRNA sense strand against b2GPI
agccacauuuggcugccauga

SEQ ID NO: 745 - RNA, 21 nt, Artificial Seqence
  Synthetic siRNA sense strand against b2GPI
gccacauuuggcugccaugau

SEQ ID NO: 746 - RNA, 21 nt, Artificial Seqence
  Synthetic siRNA sense strand against b2GPI
ccacauuuggcugccaugaug

SEQ ID NO: 747 - RNA, 21 nt, Artificial Seqence
  Synthetic siRNA sense strand against b2GPI
cacauuuggcugccaugaugg

SEQ ID NO: 748 - RNA, 21 nt, Artificial Seqence
  Synthetic siRNA sense strand against b2GPI
acauuuggcugccaugaugga

SEQ ID NO: 749 - RNA, 21 nt, Artificial Seqence
  Synthetic siRNA sense strand against b2GPI
cauuuggcugccaugauggau

SEQ ID NO: 750 - RNA, 21 nt, Artificial Seqence
  Synthetic siRNA sense strand against b2GPI
auuuggcugccaugauggaua

SEQ ID NO: 751 - RNA, 21 nt, Artificial Seqence
  Synthetic siRNA sense strand against b2GPI
uuuggcugccaugauggauau

SEQ ID NO: 752 - RNA, 21 nt, Artificial Seqence
  Synthetic siRNA sense strand against b2GPI
uuggcugccaugauggauauu

SEQ ID NO: 753 - RNA, 21 nt, Artificial Seqence
  Synthetic siRNA sense strand against b2GPI
uggcugccaugauggauauuc

SEQ ID NO: 754 - RNA, 21 nt, Artificial Seqence
  Synthetic siRNA sense strand against b2GPI
ggcugccaugauggauauucu

SEQ ID NO: 755 - RNA, 21 nt, Artificial Seqence
  Synthetic siRNA sense strand against b2GPI
gcugccaugauggauauucuc

SEQ ID NO: 756 - RNA, 21 nt, Artificial Seqence
  Synthetic siRNA sense strand against b2GPI
cugccaugauggauauucucu

SEQ ID NO: 757 - RNA, 21 nt, Artificial Seqence
  Synthetic siRNA sense strand against b2GPI
ugccaugauggauauucucug

SEQ ID NO: 758 - RNA, 21 nt, Artificial Seqence
  Synthetic siRNA sense strand against b2GPI
gccaugauggauauucucugg

SEQ ID NO: 759 - RNA, 21 nt, Artificial Seqence
  Synthetic siRNA sense strand against b2GPI
ccaugauggauauucucugga

SEQ ID NO: 760 - RNA, 21 nt, Artificial Seqence
  Synthetic siRNA sense strand against b2GPI
caugauggauauucucuggau

SEQ ID NO: 761 - RNA, 21 nt, Artificial Seqence
  Synthetic siRNA sense strand against b2GPI
augauggauauucucuggaug

SEQ ID NO: 762 - RNA, 21 nt, Artificial Seqence
  Synthetic siRNA sense strand against b2GPI
ugauggauauucucuggaugg

SEQ ID NO: 763 - RNA, 21 nt, Artificial Seqence
  Synthetic siRNA sense strand against b2GPI
gauggauauucucuggauggc

SEQ ID NO: 764 - RNA, 21 nt, Artificial Seqence
  Synthetic siRNA sense strand against b2GPI
auggauauucucuggauggcc

SEQ ID NO: 765 - RNA, 21 nt, Artificial Seqence
  Synthetic siRNA sense strand against b2GPI
uggauauucucuggauggccc

SEQ ID NO: 766 - RNA, 21 nt, Artificial Seqence
  Synthetic siRNA sense strand against b2GPI
ggauauucucuggauggcccg

SEQ ID NO: 767 - RNA, 21 nt, Artificial Seqence
  Synthetic siRNA sense strand against b2GPI
gauauucucuggauggcccgg

SEQ ID NO: 768 - RNA, 21 nt, Artificial Seqence
  Synthetic siRNA sense strand against b2GPI
auauucucuggauggcccgga

SEQ ID NO: 769 - RNA, 21 nt, Artificial Seqence
  Synthetic siRNA sense strand against b2GPI
uauucucuggauggcccggaa

SEQ ID NO: 770 - RNA, 21 nt, Artificial Seqence
  Synthetic siRNA sense strand against b2GPI
auucucuggauggcccggaag

SEQ ID NO: 771 - RNA, 21 nt, Artificial Seqence
  Synthetic siRNA sense strand against b2GPI
uucucuggauggcccggaaga

SEQ ID NO: 772 - RNA, 21 nt, Artificial Seqence
  Synthetic siRNA sense strand against b2GPI
ucucuggauggcccggaagaa

SEQ ID NO: 773 - RNA, 21 nt, Artificial Seqence
  Synthetic siRNA sense strand against b2GPI
cucuggauggcccggaagaaa

SEQ ID NO: 774 - RNA, 21 nt, Artificial Seqence
  Synthetic siRNA sense strand against b2GPI
ucuggauggcccggaagaaau

SEQ ID NO: 775 - RNA, 21 nt, Artificial Seqence
  Synthetic siRNA sense strand against b2GPI
cuggauggcccggaagaaaua

SEQ ID NO: 776 - RNA, 21 nt, Artificial Seqence
  Synthetic siRNA sense strand against b2GPI
uggauggcccggaagaaauag

SEQ ID NO: 777 - RNA, 21 nt, Artificial Seqence
  Synthetic siRNA sense strand against b2GPI
ggauggcccggaagaaauaga

SEQ ID NO: 778 - RNA, 21 nt, Artificial Seqence
  Synthetic siRNA sense strand against b2GPI
gauggcccggaagaaauagaa

SEQ ID NO: 779 - RNA, 21 nt, Artificial Seqence
  Synthetic siRNA sense strand against b2GPI
auggcccggaagaaauagaau

SEQ ID NO: 780 - RNA, 21 nt, Artificial Seqence
  Synthetic siRNA sense strand against b2GPI
uggcccggaagaaauagaaug

SEQ ID NO: 781 - RNA, 21 nt, Artificial Seqence
  Synthetic siRNA sense strand against b2GPI
ggcccggaagaaauagaaugu

SEQ ID NO: 782 - RNA, 21 nt, Artificial Seqence
  Synthetic siRNA sense strand against b2GPI
gcccggaagaaauagaaugua

SEQ ID NO: 783 - RNA, 21 nt, Artificial Seqence
  Synthetic siRNA sense strand against b2GPI
cccggaagaaauagaauguac

SEQ ID NO: 784 - RNA, 21 nt, Artificial Seqence
  Synthetic siRNA sense strand against b2GPI
ccggaagaaauagaauguacc

SEQ ID NO: 785 - RNA, 21 nt, Artificial Seqence
  Synthetic siRNA sense strand against b2GPI
cggaagaaauagaauguacca

SEQ ID NO: 786 - RNA, 21 nt, Artificial Seqence
  Synthetic siRNA sense strand against b2GPI
ggaagaaauagaauguaccaa

SEQ ID NO: 787 - RNA, 21 nt, Artificial Seqence
  Synthetic siRNA sense strand against b2GPI
gaagaaauagaauguaccaaa

SEQ ID NO: 788 - RNA, 21 nt, Artificial Seqence
  Synthetic siRNA sense strand against b2GPI
aagaaauagaauguaccaaac

SEQ ID NO: 789 - RNA, 21 nt, Artificial Seqence
  Synthetic siRNA sense strand against b2GPI
agaaauagaauguaccaaacu

SEQ ID NO: 790 - RNA, 21 nt, Artificial Seqence
  Synthetic siRNA sense strand against b2GPI
gaaauagaauguaccaaacug

SEQ ID NO: 791 - RNA, 21 nt, Artificial Seqence
  Synthetic siRNA sense strand against b2GPI
aaauagaauguaccaaacugg

SEQ ID NO: 792 - RNA, 21 nt, Artificial Seqence
  Synthetic siRNA sense strand against b2GPI
aauagaauguaccaaacuggg

SEQ ID NO: 793 - RNA, 21 nt, Artificial Seqence
  Synthetic siRNA sense strand against b2GPI
auagaauguaccaaacuggga

SEQ ID NO: 794 - RNA, 21 nt, Artificial Seqence
  Synthetic siRNA sense strand against b2GPI
uagaauguaccaaacugggaa

SEQ ID NO: 795 - RNA, 21 nt, Artificial Seqence
  Synthetic siRNA sense strand against b2GPI
agaauguaccaaacugggaaa

SEQ ID NO: 796 - RNA, 21 nt, Artificial Seqence
  Synthetic siRNA sense strand against b2GPI
gaauguaccaaacugggaaac

SEQ ID NO: 797 - RNA, 21 nt, Artificial Seqence
  Synthetic siRNA sense strand against b2GPI
aauguaccaaacugggaaacu

SEQ ID NO: 798 - RNA, 21 nt, Artificial Seqence
  Synthetic siRNA sense strand against b2GPI
auguaccaaacugggaaacug

SEQ ID NO: 799 - RNA, 21 nt, Artificial Seqence
  Synthetic siRNA sense strand against b2GPI
uguaccaaacugggaaacugg

SEQ ID NO: 800 - RNA, 21 nt, Artificial Seqence
  Synthetic siRNA sense strand against b2GPI
guaccaaacugggaaacuggu

SEQ ID NO: 801 - RNA, 21 nt, Artificial Seqence
  Synthetic siRNA sense strand against b2GPI
uaccaaacugggaaacugguc

SEQ ID NO: 802 - RNA, 21 nt, Artificial Seqence
  Synthetic siRNA sense strand against b2GPI
accaaacugggaaacuggucu

SEQ ID NO: 803 - RNA, 21 nt, Artificial Seqence
  Synthetic siRNA sense strand against b2GPI
ccaaacugggaaacuggucug

SEQ ID NO: 804 - RNA, 21 nt, Artificial Seqence
  Synthetic siRNA sense strand against b2GPI
caaacugggaaacuggucugc

SEQ ID NO: 805 - RNA, 21 nt, Artificial Seqence
  Synthetic siRNA sense strand against b2GPI
aaacugggaaacuggucugcc

SEQ ID NO: 806 - RNA, 21 nt, Artificial Seqence
  Synthetic siRNA sense strand against b2GPI
aacugggaaacuggucugcca

SEQ ID NO: 807 - RNA, 21 nt, Artificial Seqence
  Synthetic siRNA sense strand against b2GPI
acugggaaacuggucugccau

SEQ ID NO: 808 - RNA, 21 nt, Artificial Seqence
  Synthetic siRNA sense strand against b2GPI
cugggaaacuggucugccaug

SEQ ID NO: 809 - RNA, 21 nt, Artificial Seqence
  Synthetic siRNA sense strand against b2GPI
ugggaaacuggucugccaugc

SEQ ID NO: 810 - RNA, 21 nt, Artificial Seqence
  Synthetic siRNA sense strand against b2GPI
gggaaacuggucugccaugcc

SEQ ID NO: 811 - RNA, 21 nt, Artificial Seqence
  Synthetic siRNA sense strand against b2GPI
ggaaacuggucugccaugcca

SEQ ID NO: 812 - RNA, 21 nt, Artificial Seqence
  Synthetic siRNA sense strand against b2GPI
gaaacuggucugccaugccaa

SEQ ID NO: 813 - RNA, 21 nt, Artificial Seqence
  Synthetic siRNA sense strand against b2GPI
aaacuggucugccaugccaag

SEQ ID NO: 814 - RNA, 21 nt, Artificial Seqence
  Synthetic siRNA sense strand against b2GPI
aacuggucugccaugccaagu

SEQ ID NO: 815 - RNA, 21 nt, Artificial Seqence
  Synthetic siRNA sense strand against b2GPI
acuggucugccaugccaaguu

SEQ ID NO: 816 - RNA, 21 nt, Artificial Seqence
  Synthetic siRNA sense strand against b2GPI
cuggucugccaugccaaguug

SEQ ID NO: 817 - RNA, 21 nt, Artificial Seqence
  Synthetic siRNA sense strand against b2GPI
uggucugccaugccaaguugu

SEQ ID NO: 818 - RNA, 21 nt, Artificial Seqence
  Synthetic siRNA sense strand against b2GPI
ggucugccaugccaaguugua

SEQ ID NO: 819 - RNA, 21 nt, Artificial Seqence
  Synthetic siRNA sense strand against b2GPI
gucugccaugccaaguuguaa

SEQ ID NO: 820 - RNA, 21 nt, Artificial Seqence
  Synthetic siRNA sense strand against b2GPI
ucugccaugccaaguuguaaa

SEQ ID NO: 821 - RNA, 21 nt, Artificial Seqence
  Synthetic siRNA sense strand against b2GPI
cugccaugccaaguuguaaag

SEQ ID NO: 822 - RNA, 21 nt, Artificial Seqence
  Synthetic siRNA sense strand against b2GPI
ugccaugccaaguuguaaagc

SEQ ID NO: 823 - RNA, 21 nt, Artificial Seqence
  Synthetic siRNA sense strand against b2GPI
gccaugccaaguuguaaagca

SEQ ID NO: 824 - RNA, 21 nt, Artificial Seqence
  Synthetic siRNA sense strand against b2GPI
ccaugccaaguuguaaagcau

SEQ ID NO: 825 - RNA, 21 nt, Artificial Seqence
  Synthetic siRNA sense strand against b2GPI
caugccaaguuguaaagcauc

SEQ ID NO: 826 - RNA, 21 nt, Artificial Seqence
  Synthetic siRNA sense strand against b2GPI
augccaaguuguaaagcaucu

SEQ ID NO: 827 - RNA, 21 nt, Artificial Seqence
  Synthetic siRNA sense strand against b2GPI
ugccaaguuguaaagcaucuu

SEQ ID NO: 828 - RNA, 21 nt, Artificial Seqence
  Synthetic siRNA sense strand against b2GPI
gccaaguuguaaagcaucuug

SEQ ID NO: 829 - RNA, 21 nt, Artificial Seqence
  Synthetic siRNA sense strand against b2GPI
ccaaguuguaaagcaucuugu

SEQ ID NO: 830 - RNA, 21 nt, Artificial Seqence
  Synthetic siRNA sense strand against b2GPI
caaguuguaaagcaucuugua

SEQ ID NO: 831 - RNA, 21 nt, Artificial Seqence
  Synthetic siRNA sense strand against b2GPI
aaguuguaaagcaucuuguaa

SEQ ID NO: 832 - RNA, 21 nt, Artificial Seqence
  Synthetic siRNA sense strand against b2GPI
aguuguaaagcaucuuguaaa

SEQ ID NO: 833 - RNA, 21 nt, Artificial Seqence
  Synthetic siRNA sense strand against b2GPI
guuguaaagcaucuuguaaag

SEQ ID NO: 834 - RNA, 21 nt, Artificial Seqence
  Synthetic siRNA sense strand against b2GPI
uuguaaagcaucuuguaaagu

SEQ ID NO: 835 - RNA, 21 nt, Artificial Seqence
  Synthetic siRNA sense strand against b2GPI
uguaaagcaucuuguaaagua

SEQ ID NO: 836 - RNA, 21 nt, Artificial Seqence
  Synthetic siRNA sense strand against b2GPI
guaaagcaucuuguaaaguac

SEQ ID NO: 837 - RNA, 21 nt, Artificial Seqence
  Synthetic siRNA sense strand against b2GPI
uaaagcaucuuguaaaguacc

SEQ ID NO: 838 - RNA, 21 nt, Artificial Seqence
  Synthetic siRNA sense strand against b2GPI
aaagcaucuuguaaaguaccu

SEQ ID NO: 839 - RNA, 21 nt, Artificial Seqence
  Synthetic siRNA sense strand against b2GPI
aagcaucuuguaaaguaccug

SEQ ID NO: 840 - RNA, 21 nt, Artificial Seqence
  Synthetic siRNA sense strand against b2GPI
agcaucuuguaaaguaccugu

SEQ ID NO: 841 - RNA, 21 nt, Artificial Seqence
  Synthetic siRNA sense strand against b2GPI
gcaucuuguaaaguaccugug

SEQ ID NO: 842 - RNA, 21 nt, Artificial Seqence
  Synthetic siRNA sense strand against b2GPI
caucuuguaaaguaccuguga

SEQ ID NO: 843 - RNA, 21 nt, Artificial Seqence
  Synthetic siRNA sense strand against b2GPI
aucuuguaaaguaccugugaa

SEQ ID NO: 844 - RNA, 21 nt, Artificial Seqence
  Synthetic siRNA sense strand against b2GPI
ucuuguaaaguaccugugaaa

SEQ ID NO: 845 - RNA, 21 nt, Artificial Seqence
  Synthetic siRNA sense strand against b2GPI
cuuguaaaguaccugugaaaa

SEQ ID NO: 846 - RNA, 21 nt, Artificial Seqence
  Synthetic siRNA sense strand against b2GPI
uuguaaaguaccugugaaaaa

SEQ ID NO: 847 - RNA, 21 nt, Artificial Seqence
  Synthetic siRNA sense strand against b2GPI
uguaaaguaccugugaaaaaa

SEQ ID NO: 848 - RNA, 21 nt, Artificial Seqence
  Synthetic siRNA sense strand against b2GPI
guaaaguaccugugaaaaaag

SEQ ID NO: 849 - RNA, 21 nt, Artificial Seqence
  Synthetic siRNA sense strand against b2GPI
uaaaguaccugugaaaaaagc

SEQ ID NO: 850 - RNA, 21 nt, Artificial Seqence
  Synthetic siRNA sense strand against b2GPI
aaaguaccugugaaaaaagcc

SEQ ID NO: 851 - RNA, 21 nt, Artificial Seqence
  Synthetic siRNA sense strand against b2GPI
aaguaccugugaaaaaagcca

SEQ ID NO: 852 - RNA, 21 nt, Artificial Seqence
  Synthetic siRNA sense strand against b2GPI
aguaccugugaaaaaagccac

SEQ ID NO: 853 - RNA, 21 nt, Artificial Seqence
  Synthetic siRNA sense strand against b2GPI
guaccugugaaaaaagccacu

SEQ ID NO: 854 - RNA, 21 nt, Artificial Seqence
  Synthetic siRNA sense strand against b2GPI
uaccugugaaaaaagccacug

SEQ ID NO: 855 - RNA, 21 nt, Artificial Seqence
  Synthetic siRNA sense strand against b2GPI
accugugaaaaaagccacugu

SEQ ID NO: 856 - RNA, 21 nt, Artificial Seqence
  Synthetic siRNA sense strand against b2GPI
ccugugaaaaaagccacugug

SEQ ID NO: 857 - RNA, 21 nt, Artificial Seqence
  Synthetic siRNA sense strand against b2GPI
cugugaaaaaagccacugugg

SEQ ID NO: 858 - RNA, 21 nt, Artificial Seqence
  Synthetic siRNA sense strand against b2GPI
ugugaaaaaagccacuguggu

SEQ ID NO: 859 - RNA, 21 nt, Artificial Seqence
  Synthetic siRNA sense strand against b2GPI
gugaaaaaagccacuguggug

SEQ ID NO: 860 - RNA, 21 nt, Artificial Seqence
  Synthetic siRNA sense strand against b2GPI
ugaaaaaagccacuguggugu

SEQ ID NO: 861 - RNA, 21 nt, Artificial Seqence
  Synthetic siRNA sense strand against b2GPI
gaaaaaagccacuguggugua

SEQ ID NO: 862 - RNA, 21 nt, Artificial Seqence
  Synthetic siRNA sense strand against b2GPI
aaaaaagccacugugguguac

SEQ ID NO: 863 - RNA, 21 nt, Artificial Seqence
  Synthetic siRNA sense strand against b2GPI
aaaaagccacugugguguacc

SEQ ID NO: 864 - RNA, 21 nt, Artificial Seqence
  Synthetic siRNA sense strand against b2GPI
aaaagccacugugguguacca

SEQ ID NO: 865 - RNA, 21 nt, Artificial Seqence
  Synthetic siRNA sense strand against b2GPI
aaagccacugugguguaccaa

SEQ ID NO: 866 - RNA, 21 nt, Artificial Seqence
  Synthetic siRNA sense strand against b2GPI
aagccacugugguguaccaag

SEQ ID NO: 867 - RNA, 21 nt, Artificial Seqence
  Synthetic siRNA sense strand against b2GPI
agccacugugguguaccaagg

SEQ ID NO: 868 - RNA, 21 nt, Artificial Seqence
  Synthetic siRNA sense strand against b2GPI
gccacugugguguaccaagga

SEQ ID NO: 869 - RNA, 21 nt, Artificial Seqence
  Synthetic siRNA sense strand against b2GPI
ccacugugguguaccaaggag

SEQ ID NO: 870 - RNA, 21 nt, Artificial Seqence
  Synthetic siRNA sense strand against b2GPI
cacugugguguaccaaggaga

SEQ ID NO: 871 - RNA, 21 nt, Artificial Seqence
  Synthetic siRNA sense strand against b2GPI
acugugguguaccaaggagag

SEQ ID NO: 872 - RNA, 21 nt, Artificial Seqence
  Synthetic siRNA sense strand against b2GPI
cugugguguaccaaggagaga

SEQ ID NO: 873 - RNA, 21 nt, Artificial Seqence
  Synthetic siRNA sense strand against b2GPI
ugugguguaccaaggagagag

SEQ ID NO: 874 - RNA, 21 nt, Artificial Seqence
  Synthetic siRNA sense strand against b2GPI
gugguguaccaaggagagaga

SEQ ID NO: 875 - RNA, 21 nt, Artificial Seqence
  Synthetic siRNA sense strand against b2GPI
ugguguaccaaggagagagag

SEQ ID NO: 876 - RNA, 21 nt, Artificial Seqence
  Synthetic siRNA sense strand against b2GPI
gguguaccaaggagagagagu

SEQ ID NO: 877 - RNA, 21 nt, Artificial Seqence
  Synthetic siRNA sense strand against b2GPI
guguaccaaggagagagagua

SEQ ID NO: 878 - RNA, 21 nt, Artificial Seqence
  Synthetic siRNA sense strand against b2GPI
uguaccaaggagagagaguaa

SEQ ID NO: 879 - RNA, 21 nt, Artificial Seqence
  Synthetic siRNA sense strand against b2GPI
guaccaaggagagagaguaaa

SEQ ID NO: 880 - RNA, 21 nt, Artificial Seqence
  Synthetic siRNA sense strand against b2GPI
uaccaaggagagagaguaaag

SEQ ID NO: 881 - RNA, 21 nt, Artificial Seqence
  Synthetic siRNA sense strand against b2GPI
accaaggagagagaguaaaga

SEQ ID NO: 882 - RNA, 21 nt, Artificial Seqence
  Synthetic siRNA sense strand against b2GPI
ccaaggagagagaguaaagau

SEQ ID NO: 883 - RNA, 21 nt, Artificial Seqence
  Synthetic siRNA sense strand against b2GPI
caaggagagagaguaaagauu

SEQ ID NO: 884 - RNA, 21 nt, Artificial Seqence
  Synthetic siRNA sense strand against b2GPI
aaggagagagaguaaagauuc

SEQ ID NO: 885 - RNA, 21 nt, Artificial Seqence
  Synthetic siRNA sense strand against b2GPI
aggagagagaguaaagauuca

SEQ ID NO: 886 - RNA, 21 nt, Artificial Seqence
  Synthetic siRNA sense strand against b2GPI
ggagagagaguaaagauucag

SEQ ID NO: 887 - RNA, 21 nt, Artificial Seqence
  Synthetic siRNA sense strand against b2GPI
gagagagaguaaagauucagg

SEQ ID NO: 888 - RNA, 21 nt, Artificial Seqence
  Synthetic siRNA sense strand against b2GPI
agagagaguaaagauucagga

SEQ ID NO: 889 - RNA, 21 nt, Artificial Seqence
  Synthetic siRNA sense strand against b2GPI
gagagaguaaagauucaggaa

SEQ ID NO: 890 - RNA, 21 nt, Artificial Seqence
  Synthetic siRNA sense strand against b2GPI
agagaguaaagauucaggaaa

SEQ ID NO: 891 - RNA, 21 nt, Artificial Seqence
  Synthetic siRNA sense strand against b2GPI
gagaguaaagauucaggaaaa

SEQ ID NO: 892 - RNA, 21 nt, Artificial Seqence
  Synthetic siRNA sense strand against b2GPI
agaguaaagauucaggaaaaa

SEQ ID NO: 893 - RNA, 21 nt, Artificial Seqence
  Synthetic siRNA sense strand against b2GPI
gaguaaagauucaggaaaaau

SEQ ID NO: 894 - RNA, 21 nt, Artificial Seqence
  Synthetic siRNA sense strand against b2GPI
aguaaagauucaggaaaaauu

SEQ ID NO: 895 - RNA, 21 nt, Artificial Seqence
  Synthetic siRNA sense strand against b2GPI
guaaagauucaggaaaaauuu

SEQ ID NO: 896 - RNA, 21 nt, Artificial Seqence
  Synthetic siRNA sense strand against b2GPI
uaaagauucaggaaaaauuua

SEQ ID NO: 897 - RNA, 21 nt, Artificial Seqence
  Synthetic siRNA sense strand against b2GPI
aaagauucaggaaaaauuuaa

SEQ ID NO: 898 - RNA, 21 nt, Artificial Seqence
  Synthetic siRNA sense strand against b2GPI
aagauucaggaaaaauuuaag

SEQ ID NO: 899 - RNA, 21 nt, Artificial Seqence
  Synthetic siRNA sense strand against b2GPI
agauucaggaaaaauuuaaga

SEQ ID NO: 900 - RNA, 21 nt, Artificial Seqence
  Synthetic siRNA sense strand against b2GPI
gauucaggaaaaauuuaagaa

SEQ ID NO: 901 - RNA, 21 nt, Artificial Seqence
  Synthetic siRNA sense strand against b2GPI
auucaggaaaaauuuaagaau

SEQ ID NO: 902 - RNA, 21 nt, Artificial Seqence
  Synthetic siRNA sense strand against b2GPI
uucaggaaaaauuuaagaaug

SEQ ID NO: 903 - RNA, 21 nt, Artificial Seqence
  Synthetic siRNA sense strand against b2GPI
ucaggaaaaauuuaagaaugg

SEQ ID NO: 904 - RNA, 21 nt, Artificial Seqence
  Synthetic siRNA sense strand against b2GPI
caggaaaaauuuaagaaugga

SEQ ID NO: 905 - RNA, 21 nt, Artificial Seqence
  Synthetic siRNA sense strand against b2GPI
aggaaaaauuuaagaauggaa

SEQ ID NO: 906 - RNA, 21 nt, Artificial Seqence
  Synthetic siRNA sense strand against b2GPI
ggaaaaauuuaagaauggaau

SEQ ID NO: 907 - RNA, 21 nt, Artificial Seqence
  Synthetic siRNA sense strand against b2GPI
gaaaaauuuaagaauggaaug

SEQ ID NO: 908 - RNA, 21 nt, Artificial Seqence
  Synthetic siRNA sense strand against b2GPI
aaaaauuuaagaauggaaugc

SEQ ID NO: 909 - RNA, 21 nt, Artificial Seqence
  Synthetic siRNA sense strand against b2GPI
aaaauuuaagaauggaaugcu

SEQ ID NO: 910 - RNA, 21 nt, Artificial Seqence
  Synthetic siRNA sense strand against b2GPI
aaauuuaagaauggaaugcua

SEQ ID NO: 911 - RNA, 21 nt, Artificial Seqence
  Synthetic siRNA sense strand against b2GPI
aauuuaagaauggaaugcuac

SEQ ID NO: 912 - RNA, 21 nt, Artificial Seqence
  Synthetic siRNA sense strand against b2GPI
auuuaagaauggaaugcuaca

SEQ ID NO: 913 - RNA, 21 nt, Artificial Seqence
  Synthetic siRNA sense strand against b2GPI
uuuaagaauggaaugcuacau

SEQ ID NO: 914 - RNA, 21 nt, Artificial Seqence
  Synthetic siRNA sense strand against b2GPI
uuaagaauggaaugcuacaug

SEQ ID NO: 915 - RNA, 21 nt, Artificial Seqence
  Synthetic siRNA sense strand against b2GPI
uaagaauggaaugcuacaugg

SEQ ID NO: 916 - RNA, 21 nt, Artificial Seqence
  Synthetic siRNA sense strand against b2GPI
aagaauggaaugcuacauggu

SEQ ID NO: 917 - RNA, 21 nt, Artificial Seqence
  Synthetic siRNA sense strand against b2GPI
agaauggaaugcuacauggug

SEQ ID NO: 918 - RNA, 21 nt, Artificial Seqence
  Synthetic siRNA sense strand against b2GPI
gaauggaaugcuacaugguga

SEQ ID NO: 919 - RNA, 21 nt, Artificial Seqence
  Synthetic siRNA sense strand against b2GPI
aauggaaugcuacauggugau

SEQ ID NO: 920 - RNA, 21 nt, Artificial Seqence
  Synthetic siRNA sense strand against b2GPI
auggaaugcuacauggugaua

SEQ ID NO: 921 - RNA, 21 nt, Artificial Seqence
  Synthetic siRNA sense strand against b2GPI
uggaaugcuacauggugauaa

SEQ ID NO: 922 - RNA, 21 nt, Artificial Seqence
  Synthetic siRNA sense strand against b2GPI
ggaaugcuacauggugauaaa

SEQ ID NO: 923 - RNA, 21 nt, Artificial Seqence
  Synthetic siRNA sense strand against b2GPI
gaaugcuacauggugauaaag

SEQ ID NO: 924 - RNA, 21 nt, Artificial Seqence
  Synthetic siRNA sense strand against b2GPI
aaugcuacauggugauaaagu

SEQ ID NO: 925 - RNA, 21 nt, Artificial Seqence
  Synthetic siRNA sense strand against b2GPI
augcuacauggugauaaaguu

SEQ ID NO: 926 - RNA, 21 nt, Artificial Seqence
  Synthetic siRNA sense strand against b2GPI
ugcuacauggugauaaaguuu

SEQ ID NO: 927 - RNA, 21 nt, Artificial Seqence
  Synthetic siRNA sense strand against b2GPI
gcuacauggugauaaaguuuc

SEQ ID NO: 928 - RNA, 21 nt, Artificial Seqence
  Synthetic siRNA sense strand against b2GPI
cuacauggugauaaaguuucu

SEQ ID NO: 929 - RNA, 21 nt, Artificial Seqence
  Synthetic siRNA sense strand against b2GPI
uacauggugauaaaguuucuu

SEQ ID NO: 930 - RNA, 21 nt, Artificial Seqence
  Synthetic siRNA sense strand against b2GPI
acauggugauaaaguuucuuu

SEQ ID NO: 931 - RNA, 21 nt, Artificial Seqence
  Synthetic siRNA sense strand against b2GPI
cauggugauaaaguuucuuuc

SEQ ID NO: 932 - RNA, 21 nt, Artificial Seqence
  Synthetic siRNA sense strand against b2GPI
auggugauaaaguuucuuucu

SEQ ID NO: 933 - RNA, 21 nt, Artificial Seqence
  Synthetic siRNA sense strand against b2GPI
uggugauaaaguuucuuucuu

SEQ ID NO: 934 - RNA, 21 nt, Artificial Seqence
  Synthetic siRNA sense strand against b2GPI
ggugauaaaguuucuuucuuc

SEQ ID NO: 935 - RNA, 21 nt, Artificial Seqence
  Synthetic siRNA sense strand against b2GPI
gugauaaaguuucuuucuucu

SEQ ID NO: 936 - RNA, 21 nt, Artificial Seqence
  Synthetic siRNA sense strand against b2GPI
ugauaaaguuucuuucuucug

SEQ ID NO: 937 - RNA, 21 nt, Artificial Seqence
  Synthetic siRNA sense strand against b2GPI
gauaaaguuucuuucuucugc

SEQ ID NO: 938 - RNA, 21 nt, Artificial Seqence
  Synthetic siRNA sense strand against b2GPI
auaaaguuucuuucuucugca

SEQ ID NO: 939 - RNA, 21 nt, Artificial Seqence
  Synthetic siRNA sense strand against b2GPI
uaaaguuucuuucuucugcaa

SEQ ID NO: 940 - RNA, 21 nt, Artificial Seqence
  Synthetic siRNA sense strand against b2GPI
aaaguuucuuucuucugcaaa

SEQ ID NO: 941 - RNA, 21 nt, Artificial Seqence
  Synthetic siRNA sense strand against b2GPI
aaguuucuuucuucugcaaaa

SEQ ID NO: 942 - RNA, 21 nt, Artificial Seqence
  Synthetic siRNA sense strand against b2GPI
aguuucuuucuucugcaaaaa

SEQ ID NO: 943 - RNA, 21 nt, Artificial Seqence
  Synthetic siRNA sense strand against b2GPI
guuucuuucuucugcaaaaau

SEQ ID NO: 944 - RNA, 21 nt, Artificial Seqence
  Synthetic siRNA sense strand against b2GPI
uuucuuucuucugcaaaaaua

SEQ ID NO: 945 - RNA, 21 nt, Artificial Seqence
  Synthetic siRNA sense strand against b2GPI
uucuuucuucugcaaaaauaa

SEQ ID NO: 946 - RNA, 21 nt, Artificial Seqence
  Synthetic siRNA sense strand against b2GPI
ucuuucuucugcaaaaauaag

SEQ ID NO: 947 - RNA, 21 nt, Artificial Seqence
  Synthetic siRNA sense strand against b2GPI
cuuucuucugcaaaaauaagg

SEQ ID NO: 948 - RNA, 21 nt, Artificial Seqence
  Synthetic siRNA sense strand against b2GPI
uuucuucugcaaaaauaagga

SEQ ID NO: 949 - RNA, 21 nt, Artificial Seqence
  Synthetic siRNA sense strand against b2GPI
uucuucugcaaaaauaaggaa

SEQ ID NO: 950 - RNA, 21 nt, Artificial Seqence
  Synthetic siRNA sense strand against b2GPI
ucuucugcaaaaauaaggaaa

SEQ ID NO: 951 - RNA, 21 nt, Artificial Seqence
  Synthetic siRNA sense strand against b2GPI
cuucugcaaaaauaaggaaaa

SEQ ID NO: 952 - RNA, 21 nt, Artificial Seqence
  Synthetic siRNA sense strand against b2GPI
uucugcaaaaauaaggaaaag

SEQ ID NO: 953 - RNA, 21 nt, Artificial Seqence
  Synthetic siRNA sense strand against b2GPI
ucugcaaaaauaaggaaaaga

SEQ ID NO: 954 - RNA, 21 nt, Artificial Seqence
  Synthetic siRNA sense strand against b2GPI
cugcaaaaauaaggaaaagaa

SEQ ID NO: 955 - RNA, 21 nt, Artificial Seqence
  Synthetic siRNA sense strand against b2GPI
ugcaaaaauaaggaaaagaag

SEQ ID NO: 956 - RNA, 21 nt, Artificial Seqence
  Synthetic siRNA sense strand against b2GPI
gcaaaaauaaggaaaagaagu

SEQ ID NO: 957 - RNA, 21 nt, Artificial Seqence
  Synthetic siRNA sense strand against b2GPI
caaaaauaaggaaaagaagug

SEQ ID NO: 958 - RNA, 21 nt, Artificial Seqence
  Synthetic siRNA sense strand against b2GPI
aaaaauaaggaaaagaagugu

SEQ ID NO: 959 - RNA, 21 nt, Artificial Seqence
  Synthetic siRNA sense strand against b2GPI
aaaauaaggaaaagaagugua

SEQ ID NO: 960 - RNA, 21 nt, Artificial Seqence
  Synthetic siRNA sense strand against b2GPI
aaauaaggaaaagaaguguag

SEQ ID NO: 961 - RNA, 21 nt, Artificial Seqence
  Synthetic siRNA sense strand against b2GPI
aauaaggaaaagaaguguagc

SEQ ID NO: 962 - RNA, 21 nt, Artificial Seqence
  Synthetic siRNA sense strand against b2GPI
auaaggaaaagaaguguagcu

SEQ ID NO: 963 - RNA, 21 nt, Artificial Seqence
  Synthetic siRNA sense strand against b2GPI
uaaggaaaagaaguguagcua

SEQ ID NO: 964 - RNA, 21 nt, Artificial Seqence
  Synthetic siRNA sense strand against b2GPI
aaggaaaagaaguguagcuau

SEQ ID NO: 965 - RNA, 21 nt, Artificial Seqence
  Synthetic siRNA sense strand against b2GPI
aggaaaagaaguguagcuaua

SEQ ID NO: 966 - RNA, 21 nt, Artificial Seqence
  Synthetic siRNA sense strand against b2GPI
ggaaaagaaguguagcuauac

SEQ ID NO: 967 - RNA, 21 nt, Artificial Seqence
  Synthetic siRNA sense strand against b2GPI
gaaaagaaguguagcuauaca

SEQ ID NO: 968 - RNA, 21 nt, Artificial Seqence
  Synthetic siRNA sense strand against b2GPI
aaaagaaguguagcuauacag

SEQ ID NO: 969 - RNA, 21 nt, Artificial Seqence
  Synthetic siRNA sense strand against b2GPI
aaagaaguguagcuauacaga

SEQ ID NO: 970 - RNA, 21 nt, Artificial Seqence
  Synthetic siRNA sense strand against b2GPI
aagaaguguagcuauacagag

SEQ ID NO: 971 - RNA, 21 nt, Artificial Seqence
  Synthetic siRNA sense strand against b2GPI
agaaguguagcuauacagagg

SEQ ID NO: 972 - RNA, 21 nt, Artificial Seqence
  Synthetic siRNA sense strand against b2GPI
gaaguguagcuauacagagga

SEQ ID NO: 973 - RNA, 21 nt, Artificial Seqence
  Synthetic siRNA sense strand against b2GPI
aaguguagcuauacagaggau

SEQ ID NO: 974 - RNA, 21 nt, Artificial Seqence
  Synthetic siRNA sense strand against b2GPI
aguguagcuauacagaggaug

SEQ ID NO: 975 - RNA, 21 nt, Artificial Seqence
  Synthetic siRNA sense strand against b2GPI
guguagcuauacagaggaugc

SEQ ID NO: 976 - RNA, 21 nt, Artificial Seqence
  Synthetic siRNA sense strand against b2GPI
uguagcuauacagaggaugcu

SEQ ID NO: 977 - RNA, 21 nt, Artificial Seqence
  Synthetic siRNA sense strand against b2GPI
guagcuauacagaggaugcuc

SEQ ID NO: 978 - RNA, 21 nt, Artificial Seqence
  Synthetic siRNA sense strand against b2GPI
uagcuauacagaggaugcuca

SEQ ID NO: 979 - RNA, 21 nt, Artificial Seqence
  Synthetic siRNA sense strand against b2GPI
agcuauacagaggaugcucag

SEQ ID NO: 980 - RNA, 21 nt, Artificial Seqence
  Synthetic siRNA sense strand against b2GPI
gcuauacagaggaugcucagu

SEQ ID NO: 981 - RNA, 21 nt, Artificial Seqence
  Synthetic siRNA sense strand against b2GPI
cuauacagaggaugcucagug

SEQ ID NO: 982 - RNA, 21 nt, Artificial Seqence
  Synthetic siRNA sense strand against b2GPI
uauacagaggaugcucagugu

SEQ ID NO: 983 - RNA, 21 nt, Artificial Seqence
  Synthetic siRNA sense strand against b2GPI
auacagaggaugcucagugua

SEQ ID NO: 984 - RNA, 21 nt, Artificial Seqence
  Synthetic siRNA sense strand against b2GPI
uacagaggaugcucaguguau

SEQ ID NO: 985 - RNA, 21 nt, Artificial Seqence
  Synthetic siRNA sense strand against b2GPI
acagaggaugcucaguguaua

SEQ ID NO: 986 - RNA, 21 nt, Artificial Seqence
  Synthetic siRNA sense strand against b2GPI
cagaggaugcucaguguauag

SEQ ID NO: 987 - RNA, 21 nt, Artificial Seqence
  Synthetic siRNA sense strand against b2GPI
agaggaugcucaguguauaga

SEQ ID NO: 988 - RNA, 21 nt, Artificial Seqence
  Synthetic siRNA sense strand against b2GPI
gaggaugcucaguguauagau

SEQ ID NO: 989 - RNA, 21 nt, Artificial Seqence
  Synthetic siRNA sense strand against b2GPI
aggaugcucaguguauagaug

SEQ ID NO: 990 - RNA, 21 nt, Artificial Seqence
  Synthetic siRNA sense strand against b2GPI
ggaugcucaguguauagaugg

SEQ ID NO: 991 - RNA, 21 nt, Artificial Seqence
  Synthetic siRNA sense strand against b2GPI
gaugcucaguguauagauggc

SEQ ID NO: 992 - RNA, 21 nt, Artificial Seqence
  Synthetic siRNA sense strand against b2GPI
augcucaguguauagauggca

SEQ ID NO: 993 - RNA, 21 nt, Artificial Seqence
  Synthetic siRNA sense strand against b2GPI
ugcucaguguauagauggcac

SEQ ID NO: 994 - RNA, 21 nt, Artificial Seqence
  Synthetic siRNA sense strand against b2GPI
gcucaguguauagauggcacu

SEQ ID NO: 995 - RNA, 21 nt, Artificial Seqence
  Synthetic siRNA sense strand against b2GPI
cucaguguauagauggcacua

SEQ ID NO: 996 - RNA, 21 nt, Artificial Seqence
  Synthetic siRNA sense strand against b2GPI
ucaguguauagauggcacuau

SEQ ID NO: 997 - RNA, 21 nt, Artificial Seqence
  Synthetic siRNA sense strand against b2GPI
caguguauagauggcacuauc

SEQ ID NO: 998 - RNA, 21 nt, Artificial Seqence
  Synthetic siRNA sense strand against b2GPI
aguguauagauggcacuaucg

SEQ ID NO: 999 - RNA, 21 nt, Artificial Seqence
  Synthetic siRNA sense strand against b2GPI
guguauagauggcacuaucga

SEQ ID NO: 1000 - RNA, 21 nt, Artificial Seqence
  Synthetic siRNA sense strand against b2GPI
uguauagauggcacuaucgaa

SEQ ID NO: 1001 - RNA, 21 nt, Artificial Seqence
  Synthetic siRNA sense strand against b2GPI
guauagauggcacuaucgaag

SEQ ID NO: 1002 - RNA, 21 nt, Artificial Seqence
  Synthetic siRNA sense strand against b2GPI
uauagauggcacuaucgaagu

SEQ ID NO: 1003 - RNA, 21 nt, Artificial Seqence
  Synthetic siRNA sense strand against b2GPI
auagauggcacuaucgaaguc

SEQ ID NO: 1004 - RNA, 21 nt, Artificial Seqence
  Synthetic siRNA sense strand against b2GPI
uagauggcacuaucgaagucc

SEQ ID NO: 1005 - RNA, 21 nt, Artificial Seqence
  Synthetic siRNA sense strand against b2GPI
agauggcacuaucgaaguccc

SEQ ID NO: 1006 - RNA, 21 nt, Artificial Seqence
  Synthetic siRNA sense strand against b2GPI
gauggcacuaucgaagucccc

SEQ ID NO: 1007 - RNA, 21 nt, Artificial Seqence
  Synthetic siRNA sense strand against b2GPI
auggcacuaucgaagucccca

SEQ ID NO: 1008 - RNA, 21 nt, Artificial Seqence
  Synthetic siRNA sense strand against b2GPI
uggcacuaucgaaguccccaa

SEQ ID NO: 1009 - RNA, 21 nt, Artificial Seqence
  Synthetic siRNA sense strand against b2GPI
ggcacuaucgaaguccccaaa

SEQ ID NO: 1010 - RNA, 21 nt, Artificial Seqence
  Synthetic siRNA sense strand against b2GPI
gcacuaucgaaguccccaaau

SEQ ID NO: 1011 - RNA, 21 nt, Artificial Seqence
  Synthetic siRNA sense strand against b2GPI
cacuaucgaaguccccaaaug

SEQ ID NO: 1012 - RNA, 21 nt, Artificial Seqence
  Synthetic siRNA sense strand against b2GPI
acuaucgaaguccccaaaugc

SEQ ID NO: 1013 - RNA, 21 nt, Artificial Seqence
  Synthetic siRNA sense strand against b2GPI
cuaucgaaguccccaaaugcu

SEQ ID NO: 1014 - RNA, 21 nt, Artificial Seqence
  Synthetic siRNA sense strand against b2GPI
uaucgaaguccccaaaugcuu

SEQ ID NO: 1015 - RNA, 21 nt, Artificial Seqence
  Synthetic siRNA sense strand against b2GPI
aucgaaguccccaaaugcuuc

SEQ ID NO: 1016 - RNA, 21 nt, Artificial Seqence
  Synthetic siRNA sense strand against b2GPI
ucgaaguccccaaaugcuuca

SEQ ID NO: 1017 - RNA, 21 nt, Artificial Seqence
  Synthetic siRNA sense strand against b2GPI
cgaaguccccaaaugcuucaa

SEQ ID NO: 1018 - RNA, 21 nt, Artificial Seqence
  Synthetic siRNA sense strand against b2GPI
gaaguccccaaaugcuucaag

SEQ ID NO: 1019 - RNA, 21 nt, Artificial Seqence
  Synthetic siRNA sense strand against b2GPI
aaguccccaaaugcuucaagg

SEQ ID NO: 1020 - RNA, 21 nt, Artificial Seqence
  Synthetic siRNA sense strand against b2GPI
aguccccaaaugcuucaagga

SEQ ID NO: 1021 - RNA, 21 nt, Artificial Seqence
  Synthetic siRNA sense strand against b2GPI
guccccaaaugcuucaaggaa

SEQ ID NO: 1022 - RNA, 21 nt, Artificial Seqence
  Synthetic siRNA sense strand against b2GPI
uccccaaaugcuucaaggaac

SEQ ID NO: 1023 - RNA, 21 nt, Artificial Seqence
  Synthetic siRNA sense strand against b2GPI
ccccaaaugcuucaaggaaca

SEQ ID NO: 1024 - RNA, 21 nt, Artificial Seqence
  Synthetic siRNA sense strand against b2GPI
cccaaaugcuucaaggaacac

SEQ ID NO: 1025 - RNA, 21 nt, Artificial Seqence
  Synthetic siRNA sense strand against b2GPI
ccaaaugcuucaaggaacaca

SEQ ID NO: 1026 - RNA, 21 nt, Artificial Seqence
  Synthetic siRNA sense strand against b2GPI
caaaugcuucaaggaacacag

SEQ ID NO: 1027 - RNA, 21 nt, Artificial Seqence
  Synthetic siRNA sense strand against b2GPI
aaaugcuucaaggaacacagu

SEQ ID NO: 1028 - RNA, 21 nt, Artificial Seqence
  Synthetic siRNA sense strand against b2GPI
aaugcuucaaggaacacaguu

SEQ ID NO: 1029 - RNA, 21 nt, Artificial Seqence
  Synthetic siRNA sense strand against b2GPI
augcuucaaggaacacaguuc

SEQ ID NO: 1030 - RNA, 21 nt, Artificial Seqence
  Synthetic siRNA sense strand against b2GPI
ugcuucaaggaacacaguucu

SEQ ID NO: 1031 - RNA, 21 nt, Artificial Seqence
  Synthetic siRNA sense strand against b2GPI
gcuucaaggaacacaguucuc

SEQ ID NO: 1032 - RNA, 21 nt, Artificial Seqence
  Synthetic siRNA sense strand against b2GPI
cuucaaggaacacaguucucu

SEQ ID NO: 1033 - RNA, 21 nt, Artificial Seqence
  Synthetic siRNA sense strand against b2GPI
uucaaggaacacaguucucug

SEQ ID NO: 1034 - RNA, 21 nt, Artificial Seqence
  Synthetic siRNA sense strand against b2GPI
ucaaggaacacaguucucugg

SEQ ID NO: 1035 - RNA, 21 nt, Artificial Seqence
  Synthetic siRNA sense strand against b2GPI
caaggaacacaguucucuggc

SEQ ID NO: 1036 - RNA, 21 nt, Artificial Seqence
  Synthetic siRNA sense strand against b2GPI
aaggaacacaguucucuggcu

SEQ ID NO: 1037 - RNA, 21 nt, Artificial Seqence
  Synthetic siRNA sense strand against b2GPI
aggaacacaguucucuggcuu

SEQ ID NO: 1038 - RNA, 21 nt, Artificial Seqence
  Synthetic siRNA sense strand against b2GPI
ggaacacaguucucuggcuuu

SEQ ID NO: 1039 - RNA, 21 nt, Artificial Seqence
  Synthetic siRNA sense strand against b2GPI
gaacacaguucucuggcuuuu

SEQ ID NO: 1040 - RNA, 21 nt, Artificial Seqence
  Synthetic siRNA sense strand against b2GPI
aacacaguucucuggcuuuuu

SEQ ID NO: 1041 - RNA, 21 nt, Artificial Seqence
  Synthetic siRNA sense strand against b2GPI
acacaguucucuggcuuuuug

SEQ ID NO: 1042 - RNA, 21 nt, Artificial Seqence
  Synthetic siRNA sense strand against b2GPI
cacaguucucuggcuuuuugg

SEQ ID NO: 1043 - RNA, 21 nt, Artificial Seqence
  Synthetic siRNA sense strand against b2GPI
acaguucucuggcuuuuugga

SEQ ID NO: 1044 - RNA, 21 nt, Artificial Seqence
  Synthetic siRNA sense strand against b2GPI
caguucucuggcuuuuuggaa

SEQ ID NO: 1045 - RNA, 21 nt, Artificial Seqence
  Synthetic siRNA sense strand against b2GPI
aguucucuggcuuuuuggaaa

SEQ ID NO: 1046 - RNA, 21 nt, Artificial Seqence
  Synthetic siRNA sense strand against b2GPI
guucucuggcuuuuuggaaaa

SEQ ID NO: 1047 - RNA, 21 nt, Artificial Seqence
  Synthetic siRNA sense strand against b2GPI
uucucuggcuuuuuggaaaac

SEQ ID NO: 1048 - RNA, 21 nt, Artificial Seqence
  Synthetic siRNA sense strand against b2GPI
ucucuggcuuuuuggaaaacu

SEQ ID NO: 1049 - RNA, 21 nt, Artificial Seqence
  Synthetic siRNA sense strand against b2GPI
cucuggcuuuuuggaaaacug

SEQ ID NO: 1050 - RNA, 21 nt, Artificial Seqence
  Synthetic siRNA sense strand against b2GPI
ucuggcuuuuuggaaaacuga

SEQ ID NO: 1051 - RNA, 21 nt, Artificial Seqence
  Synthetic siRNA sense strand against b2GPI
cuggcuuuuuggaaaacugau

SEQ ID NO: 1052 - RNA, 21 nt, Artificial Seqence
  Synthetic siRNA sense strand against b2GPI
uggcuuuuuggaaaacugaug

SEQ ID NO: 1053 - RNA, 21 nt, Artificial Seqence
  Synthetic siRNA sense strand against b2GPI
ggcuuuuuggaaaacugaugc

SEQ ID NO: 1054 - RNA, 21 nt, Artificial Seqence
  Synthetic siRNA sense strand against b2GPI
gcuuuuuggaaaacugaugca

SEQ ID NO: 1055 - RNA, 21 nt, Artificial Seqence
  Synthetic siRNA sense strand against b2GPI
cuuuuuggaaaacugaugcau

SEQ ID NO: 1056 - RNA, 21 nt, Artificial Seqence
  Synthetic siRNA sense strand against b2GPI
uuuuuggaaaacugaugcauc

SEQ ID NO: 1057 - RNA, 21 nt, Artificial Seqence
  Synthetic siRNA sense strand against b2GPI
uuuuggaaaacugaugcaucc

SEQ ID NO: 1058 - RNA, 21 nt, Artificial Seqence
  Synthetic siRNA sense strand against b2GPI
uuuggaaaacugaugcauccg

SEQ ID NO: 1059 - RNA, 21 nt, Artificial Seqence
  Synthetic siRNA sense strand against b2GPI
uuggaaaacugaugcauccga

SEQ ID NO: 1060 - RNA, 21 nt, Artificial Seqence
  Synthetic siRNA sense strand against b2GPI
uggaaaacugaugcauccgau

SEQ ID NO: 1061 - RNA, 21 nt, Artificial Seqence
  Synthetic siRNA sense strand against b2GPI
ggaaaacugaugcauccgaug

SEQ ID NO: 1062 - RNA, 21 nt, Artificial Seqence
  Synthetic siRNA sense strand against b2GPI
gaaaacugaugcauccgaugu

SEQ ID NO: 1063 - RNA, 21 nt, Artificial Seqence
  Synthetic siRNA sense strand against b2GPI
aaaacugaugcauccgaugua

SEQ ID NO: 1064 - RNA, 21 nt, Artificial Seqence
  Synthetic siRNA sense strand against b2GPI
aaacugaugcauccgauguaa

SEQ ID NO: 1065 - RNA, 21 nt, Artificial Seqence
  Synthetic siRNA sense strand against b2GPI
aacugaugcauccgauguaaa

SEQ ID NO: 1066 - RNA, 21 nt, Artificial Seqence
  Synthetic siRNA sense strand against b2GPI
acugaugcauccgauguaaag

SEQ ID NO: 1067 - RNA, 21 nt, Artificial Seqence
  Synthetic siRNA sense strand against b2GPI
cugaugcauccgauguaaagc

SEQ ID NO: 1068 - RNA, 21 nt, Artificial Seqence
  Synthetic siRNA sense strand against b2GPI
ugaugcauccgauguaaagcc

SEQ ID NO: 1069 - RNA, 21 nt, Artificial Seqence
  Synthetic siRNA sense strand against b2GPI
gaugcauccgauguaaagcca

SEQ ID NO: 1070 - RNA, 21 nt, Artificial Seqence
  Synthetic siRNA sense strand against b2GPI
augcauccgauguaaagccau

SEQ ID NO: 1071 - RNA, 21 nt, Artificial Seqence
  Synthetic siRNA sense strand against b2GPI
ugcauccgauguaaagccaug

SEQ ID NO: 1072 - RNA, 21 nt, Artificial Seqence
  Synthetic siRNA sense strand against b2GPI
gcauccgauguaaagccaugc

SEQ ID NO: 1073 - RNA, 21 nt, Artificial Seqence
  Synthetic siRNA sense strand against b2GPI
cauccgauguaaagccaugcu

SEQ ID NO: 1074 - RNA, 21 nt, Artificial Seqence
  Synthetic siRNA sense strand against b2GPI
auccgauguaaagccaugcua

SEQ ID NO: 1075 - RNA, 21 nt, Artificial Seqence
  Synthetic siRNA sense strand against b2GPI
uccgauguaaagccaugcuaa

SEQ ID NO: 1076 - RNA, 21 nt, Artificial Seqence
  Synthetic siRNA sense strand against b2GPI
ccgauguaaagccaugcuaag

SEQ ID NO: 1077 - RNA, 21 nt, Artificial Seqence
  Synthetic siRNA sense strand against b2GPI
cgauguaaagccaugcuaagg

SEQ ID NO: 1078 - RNA, 21 nt, Artificial Seqence
  Synthetic siRNA sense strand against b2GPI
gauguaaagccaugcuaaggu

SEQ ID NO: 1079 - RNA, 21 nt, Artificial Seqence
  Synthetic siRNA sense strand against b2GPI
auguaaagccaugcuaaggug

SEQ ID NO: 1080 - RNA, 21 nt, Artificial Seqence
  Synthetic siRNA sense strand against b2GPI
uguaaagccaugcuaaggugg

SEQ ID NO: 1081 - RNA, 21 nt, Artificial Seqence
  Synthetic siRNA sense strand against b2GPI
guaaagccaugcuaagguggu

SEQ ID NO: 1082 - RNA, 21 nt, Artificial Seqence
  Synthetic siRNA sense strand against b2GPI
uaaagccaugcuaaggugguu

SEQ ID NO: 1083 - RNA, 21 nt, Artificial Seqence
  Synthetic siRNA sense strand against b2GPI
aaagccaugcuaaggugguuu

SEQ ID NO: 1084 - RNA, 21 nt, Artificial Seqence
  Synthetic siRNA sense strand against b2GPI
aagccaugcuaaggugguuuu

SEQ ID NO: 1085 - RNA, 21 nt, Artificial Seqence
  Synthetic siRNA sense strand against b2GPI
agccaugcuaaggugguuuuc

SEQ ID NO: 1086 - RNA, 21 nt, Artificial Seqence
  Synthetic siRNA sense strand against b2GPI
gccaugcuaaggugguuuuca

SEQ ID NO: 1087 - RNA, 21 nt, Artificial Seqence
  Synthetic siRNA sense strand against b2GPI
ccaugcuaaggugguuuucag

SEQ ID NO: 1088 - RNA, 21 nt, Artificial Seqence
  Synthetic siRNA sense strand against b2GPI
caugcuaaggugguuuucaga

SEQ ID NO: 1089 - RNA, 21 nt, Artificial Seqence
  Synthetic siRNA sense strand against b2GPI
augcuaaggugguuuucagau

SEQ ID NO: 1090 - RNA, 21 nt, Artificial Seqence
  Synthetic siRNA sense strand against b2GPI
ugcuaaggugguuuucagauu

SEQ ID NO: 1091 - RNA, 21 nt, Artificial Seqence
  Synthetic siRNA sense strand against b2GPI
gcuaaggugguuuucagauuc

SEQ ID NO: 1092 - RNA, 21 nt, Artificial Seqence
  Synthetic siRNA sense strand against b2GPI
cuaaggugguuuucagauucc

SEQ ID NO: 1093 - RNA, 21 nt, Artificial Seqence
  Synthetic siRNA sense strand against b2GPI
uaaggugguuuucagauucca

SEQ ID NO: 1094 - RNA, 21 nt, Artificial Seqence
  Synthetic siRNA sense strand against b2GPI
aaggugguuuucagauuccac

SEQ ID NO: 1095 - RNA, 21 nt, Artificial Seqence
  Synthetic siRNA sense strand against b2GPI
aggugguuuucagauuccaca

SEQ ID NO: 1096 - RNA, 21 nt, Artificial Seqence
  Synthetic siRNA sense strand against b2GPI
ggugguuuucagauuccacac

SEQ ID NO: 1097 - RNA, 21 nt, Artificial Seqence
  Synthetic siRNA sense strand against b2GPI
gugguuuucagauuccacaca

SEQ ID NO: 1098 - RNA, 21 nt, Artificial Seqence
  Synthetic siRNA sense strand against b2GPI
ugguuuucagauuccacacaa

SEQ ID NO: 1099 - RNA, 21 nt, Artificial Seqence
  Synthetic siRNA sense strand against b2GPI
gguuuucagauuccacacaaa

SEQ ID NO: 1100 - RNA, 21 nt, Artificial Seqence
  Synthetic siRNA sense strand against b2GPI
guuuucagauuccacacaaaa

SEQ ID NO: 1101 - RNA, 21 nt, Artificial Seqence
  Synthetic siRNA sense strand against b2GPI
uuuucagauuccacacaaaau

SEQ ID NO: 1102 - RNA, 21 nt, Artificial Seqence
  Synthetic siRNA sense strand against b2GPI
uuucagauuccacacaaaaug

SEQ ID NO: 1103 - RNA, 21 nt, Artificial Seqence
  Synthetic siRNA sense strand against b2GPI
uucagauuccacacaaaaugu

SEQ ID NO: 1104 - RNA, 21 nt, Artificial Seqence
  Synthetic siRNA sense strand against b2GPI
ucagauuccacacaaaauguc

SEQ ID NO: 1105 - RNA, 21 nt, Artificial Seqence
  Synthetic siRNA sense strand against b2GPI
cagauuccacacaaaauguca

SEQ ID NO: 1106 - RNA, 21 nt, Artificial Seqence
  Synthetic siRNA sense strand against b2GPI
agauuccacacaaaaugucac

SEQ ID NO: 1107 - RNA, 21 nt, Artificial Seqence
  Synthetic siRNA sense strand against b2GPI
gauuccacacaaaaugucaca

SEQ ID NO: 1108 - RNA, 21 nt, Artificial Seqence
  Synthetic siRNA sense strand against b2GPI
auuccacacaaaaugucacac

SEQ ID NO: 1109 - RNA, 21 nt, Artificial Seqence
  Synthetic siRNA sense strand against b2GPI
uuccacacaaaaugucacacu

SEQ ID NO: 1110 - RNA, 21 nt, Artificial Seqence
  Synthetic siRNA sense strand against b2GPI
uccacacaaaaugucacacuu

SEQ ID NO: 1111 - RNA, 21 nt, Artificial Seqence
  Synthetic siRNA sense strand against b2GPI
ccacacaaaaugucacacuug

SEQ ID NO: 1112 - RNA, 21 nt, Artificial Seqence
  Synthetic siRNA sense strand against b2GPI
cacacaaaaugucacacuugu

SEQ ID NO: 1113 - RNA, 21 nt, Artificial Seqence
  Synthetic siRNA sense strand against b2GPI
acacaaaaugucacacuuguu

SEQ ID NO: 1114 - RNA, 21 nt, Artificial Seqence
  Synthetic siRNA sense strand against b2GPI
cacaaaaugucacacuuguuu

SEQ ID NO: 1115 - RNA, 21 nt, Artificial Seqence
  Synthetic siRNA sense strand against b2GPI
acaaaaugucacacuuguuuc

SEQ ID NO: 1116 - RNA, 21 nt, Artificial Seqence
  Synthetic siRNA sense strand against b2GPI
caaaaugucacacuuguuucu

SEQ ID NO: 1117 - RNA, 21 nt, Artificial Seqence
  Synthetic siRNA sense strand against b2GPI
aaaaugucacacuuguuucuu

SEQ ID NO: 1118 - RNA, 21 nt, Artificial Seqence
  Synthetic siRNA sense strand against b2GPI
aaaugucacacuuguuucuug

SEQ ID NO: 1119 - RNA, 21 nt, Artificial Seqence
  Synthetic siRNA sense strand against b2GPI
aaugucacacuuguuucuugu

SEQ ID NO: 1120 - RNA, 21 nt, Artificial Seqence
  Synthetic siRNA sense strand against b2GPI
augucacacuuguuucuuguu

SEQ ID NO: 1121 - RNA, 21 nt, Artificial Seqence
  Synthetic siRNA sense strand against b2GPI
ugucacacuuguuucuuguuc

SEQ ID NO: 1122 - RNA, 21 nt, Artificial Seqence
  Synthetic siRNA sense strand against b2GPI
gucacacuuguuucuuguuca

SEQ ID NO: 1123 - RNA, 21 nt, Artificial Seqence
  Synthetic siRNA sense strand against b2GPI
ucacacuuguuucuuguucau

SEQ ID NO: 1124 - RNA, 21 nt, Artificial Seqence
  Synthetic siRNA sense strand against b2GPI
cacacuuguuucuuguucauc

SEQ ID NO: 1125 - RNA, 21 nt, Artificial Seqence
  Synthetic siRNA sense strand against b2GPI
acacuuguuucuuguucaucc

SEQ ID NO: 1126 - RNA, 21 nt, Artificial Seqence
  Synthetic siRNA sense strand against b2GPI
cacuuguuucuuguucaucca

SEQ ID NO: 1127 - RNA, 21 nt, Artificial Seqence
  Synthetic siRNA sense strand against b2GPI
acuuguuucuuguucauccaa

SEQ ID NO: 1128 - RNA, 21 nt, Artificial Seqence
  Synthetic siRNA sense strand against b2GPI
cuuguuucuuguucauccaag

SEQ ID NO: 1129 - RNA, 21 nt, Artificial Seqence
  Synthetic siRNA sense strand against b2GPI
uuguuucuuguucauccaagg

SEQ ID NO: 1130 - RNA, 21 nt, Artificial Seqence
  Synthetic siRNA sense strand against b2GPI
uguuucuuguucauccaagga

SEQ ID NO: 1131 - RNA, 21 nt, Artificial Seqence
  Synthetic siRNA sense strand against b2GPI
guuucuuguucauccaaggaa

SEQ ID NO: 1132 - RNA, 21 nt, Artificial Seqence
  Synthetic siRNA sense strand against b2GPI
uuucuuguucauccaaggaac

SEQ ID NO: 1133 - RNA, 21 nt, Artificial Seqence
  Synthetic siRNA sense strand against b2GPI
uucuuguucauccaaggaacc

SEQ ID NO: 1134 - RNA, 21 nt, Artificial Seqence
  Synthetic siRNA sense strand against b2GPI
ucuuguucauccaaggaaccu

SEQ ID NO: 1135 - RNA, 21 nt, Artificial Seqence
  Synthetic siRNA sense strand against b2GPI
cuuguucauccaaggaaccua

SEQ ID NO: 1136 - RNA, 21 nt, Artificial Seqence
  Synthetic siRNA sense strand against b2GPI
uuguucauccaaggaaccuaa

SEQ ID NO: 1137 - RNA, 21 nt, Artificial Seqence
  Synthetic siRNA sense strand against b2GPI
uguucauccaaggaaccuaau

SEQ ID NO: 1138 - RNA, 21 nt, Artificial Seqence
  Synthetic siRNA sense strand against b2GPI
guucauccaaggaaccuaauu

SEQ ID NO: 1139 - RNA, 21 nt, Artificial Seqence
  Synthetic siRNA sense strand against b2GPI
uucauccaaggaaccuaauug

SEQ ID NO: 1140 - RNA, 21 nt, Artificial Seqence
  Synthetic siRNA sense strand against b2GPI
ucauccaaggaaccuaauuga

SEQ ID NO: 1141 - RNA, 21 nt, Artificial Seqence
  Synthetic siRNA sense strand against b2GPI
cauccaaggaaccuaauugaa

SEQ ID NO: 1142 - RNA, 21 nt, Artificial Seqence
  Synthetic siRNA sense strand against b2GPI
auccaaggaaccuaauugaaa

SEQ ID NO: 1143 - RNA, 21 nt, Artificial Seqence
  Synthetic siRNA sense strand against b2GPI
uccaaggaaccuaauugaaau

SEQ ID NO: 1144 - RNA, 21 nt, Artificial Seqence
  Synthetic siRNA sense strand against b2GPI
ccaaggaaccuaauugaaauu

SEQ ID NO: 1145 - RNA, 21 nt, Artificial Seqence
  Synthetic siRNA sense strand against b2GPI
caaggaaccuaauugaaauuu

SEQ ID NO: 1146 - RNA, 21 nt, Artificial Seqence
  Synthetic siRNA sense strand against b2GPI
aaggaaccuaauugaaauuua

SEQ ID NO: 1147 - RNA, 21 nt, Artificial Seqence
  Synthetic siRNA sense strand against b2GPI
aggaaccuaauugaaauuuaa

SEQ ID NO: 1148 - RNA, 21 nt, Artificial Seqence
  Synthetic siRNA sense strand against b2GPI
ggaaccuaauugaaauuuaaa

SEQ ID NO: 1149 - RNA, 21 nt, Artificial Seqence
  Synthetic siRNA sense strand against b2GPI
gaaccuaauugaaauuuaaaa

SEQ ID NO: 1150 - RNA, 21 nt, Artificial Seqence
  Synthetic siRNA sense strand against b2GPI
aaccuaauugaaauuuaaaaa

SEQ ID NO: 1151 - RNA, 21 nt, Artificial Seqence
  Synthetic siRNA sense strand against b2GPI
accuaauugaaauuuaaaaau

SEQ ID NO: 1152 - RNA, 21 nt, Artificial Seqence
  Synthetic siRNA sense strand against b2GPI
ccuaauugaaauuuaaaaaua

SEQ ID NO: 1153 - RNA, 21 nt, Artificial Seqence
  Synthetic siRNA sense strand against b2GPI
cuaauugaaauuuaaaaauaa

SEQ ID NO: 1154 - RNA, 21 nt, Artificial Seqence
  Synthetic siRNA sense strand against b2GPI
uaauugaaauuuaaaaauaaa

SEQ ID NO: 1155 - RNA, 21 nt, Artificial Seqence
  Synthetic siRNA sense strand against b2GPI
aauugaaauuuaaaaauaaag

SEQ ID NO: 1156 - RNA, 21 nt, Artificial Seqence
  Synthetic siRNA sense strand against b2GPI
auugaaauuuaaaaauaaagc

SEQ ID NO: 1157 - RNA, 21 nt, Artificial Seqence
  Synthetic siRNA sense strand against b2GPI
uugaaauuuaaaaauaaagcu

SEQ ID NO: 1158 - RNA, 21 nt, Artificial Seqence
  Synthetic siRNA sense strand against b2GPI
ugaaauuuaaaaauaaagcua

SEQ ID NO: 1159 - RNA, 21 nt, Artificial Seqence
  Synthetic siRNA sense strand against b2GPI
gaaauuuaaaaauaaagcuac

SEQ ID NO: 1160 - RNA, 21 nt, Artificial Seqence
  Synthetic siRNA sense strand against b2GPI
aaauuuaaaaauaaagcuacu

SEQ ID NO: 1161 - RNA, 21 nt, Artificial Seqence
  Synthetic siRNA sense strand against b2GPI
aauuuaaaaauaaagcuacug

SEQ ID NO: 1162 - RNA, 21 nt, Artificial Seqence
  Synthetic siRNA sense strand against b2GPI
auuuaaaaauaaagcuacuga

SEQ ID NO: 1163 - RNA, 21 nt, Artificial Seqence
  Synthetic siRNA sense strand against b2GPI
uuuaaaaauaaagcuacugaa

SEQ ID NO: 1164 - RNA, 21 nt, Artificial Seqence
  Synthetic siRNA sense strand against b2GPI
uuaaaaauaaagcuacugaau

SEQ ID NO: 1165 - RNA, 21 nt, Artificial Seqence
  Synthetic siRNA sense strand against b2GPI
uaaaaauaaagcuacugaauu

SEQ ID NO: 1166 - RNA, 21 nt, Artificial Seqence
  Synthetic siRNA sense strand against b2GPI
aaaaauaaagcuacugaauuu

SEQ ID NO: 1167 - RNA, 21 nt, Artificial Seqence
  Synthetic siRNA sense strand against b2GPI
aaaauaaagcuacugaauuua

SEQ ID NO: 1168 - RNA, 21 nt, Artificial Seqence
  Synthetic siRNA sense strand against b2GPI
aaauaaagcuacugaauuuau

SEQ ID NO: 1169 - RNA, 21 nt, Artificial Seqence
  Synthetic siRNA sense strand against b2GPI
aauaaagcuacugaauuuauu

SEQ ID NO: 1170 - RNA, 21 nt, Artificial Seqence
  Synthetic siRNA sense strand against b2GPI
auaaagcuacugaauuuauug

SEQ ID NO: 1171 - RNA, 21 nt, Artificial Seqence
  Synthetic siRNA sense strand against b2GPI
uaaagcuacugaauuuauugc

SEQ ID NO: 1172 - RNA, 21 nt, Artificial Seqence
  Synthetic siRNA sense strand against b2GPI
aaagcuacugaauuuauugcc

SEQ ID NO: 1173 - RNA, 21 nt, Artificial Seqence
  Synthetic siRNA sense strand against b2GPI
aagcuacugaauuuauugccg

SEQ ID NO: 1174 - RNA, 21 nt, Artificial Seqence
  Synthetic siRNA sense strand against b2GPI
agcuacugaauuuauugccgc

SEQ ID NO: 1175 - RNA, 21 nt, Artificial Seqence
  Synthetic siRNA sense strand against b2GPI
gcuacugaauuuauugccgca

SEQ ID NO: 1176 - RNA, 21 nt, Artificial Seqence
  Synthetic siRNA sense strand against b2GPI
cuacugaauuuauugccgcac

SEQ ID NO: 1177 - RNA, 21 nt, Artificial Seqence
  Synthetic siRNA sense strand against b2GPI
uacugaauuuauugccgcacc

SEQ ID NO: 1178 - RNA, 21 nt, Artificial Seqence
  Synthetic siRNA sense strand against b2GPI
acugaauuuauugccgcaccc

SEQ ID NO: 1179 - RNA, 21 nt, Artificial Seqence
  Synthetic siRNA sense strand against b2GPI
cugaauuuauugccgcaccca

SEQ ID NO: 1180 - RNA, 21 nt, Artificial Seqence
  Synthetic siRNA sense strand against b2GPI
ugaauuuauugccgcacccaa

SEQ ID NO: 1181 - RNA, 21 nt, Artificial Seqence
  Synthetic siRNA antisense strand against b2GPI
gucugcuaaaaagacagagcc

SEQ ID NO: 1182 - RNA, 21 nt, Artificial Seqence
  Synthetic siRNA antisense strand against b2GPI
cgucugcuaaaaagacagagc

SEQ ID NO: 1183 - RNA, 21 nt, Artificial Seqence
  Synthetic siRNA antisense strand against b2GPI
ucgucugcuaaaaagacagag

SEQ ID NO: 1184 - RNA, 21 nt, Artificial Seqence
  Synthetic siRNA antisense strand against b2GPI
uucgucugcuaaaaagacaga

SEQ ID NO: 1185 - RNA, 21 nt, Artificial Seqence
  Synthetic siRNA antisense strand against b2GPI
uuucgucugcuaaaaagacag

SEQ ID NO: 1186 - RNA, 21 nt, Artificial Seqence
  Synthetic siRNA antisense strand against b2GPI
uuuucgucugcuaaaaagaca

SEQ ID NO: 1187 - RNA, 21 nt, Artificial Seqence
  Synthetic siRNA antisense strand against b2GPI
guuuucgucugcuaaaaagac

SEQ ID NO: 1188 - RNA, 21 nt, Artificial Seqence
  Synthetic siRNA antisense strand against b2GPI
gguuuucgucugcuaaaaaga

SEQ ID NO: 1189 - RNA, 21 nt, Artificial Seqence
  Synthetic siRNA antisense strand against b2GPI
ugguuuucgucugcuaaaaag

SEQ ID NO: 1190 - RNA, 21 nt, Artificial Seqence
  Synthetic siRNA antisense strand against b2GPI
gugguuuucgucugcuaaaaa

SEQ ID NO: 1191 - RNA, 21 nt, Artificial Seqence
  Synthetic siRNA antisense strand against b2GPI
agugguuuucgucugcuaaaa

SEQ ID NO: 1192 - RNA, 21 nt, Artificial Seqence
  Synthetic siRNA antisense strand against b2GPI
aagugguuuucgucugcuaaa

SEQ ID NO: 1193 - RNA, 21 nt, Artificial Seqence
  Synthetic siRNA antisense strand against b2GPI
aaagugguuuucgucugcuaa

SEQ ID NO: 1194 - RNA, 21 nt, Artificial Seqence
  Synthetic siRNA antisense strand against b2GPI
caaagugguuuucgucugcua

SEQ ID NO: 1195 - RNA, 21 nt, Artificial Seqence
  Synthetic siRNA antisense strand against b2GPI
ccaaagugguuuucgucugcu

SEQ ID NO: 1196 - RNA, 21 nt, Artificial Seqence
  Synthetic siRNA antisense strand against b2GPI
accaaagugguuuucgucugc

SEQ ID NO: 1197 - RNA, 21 nt, Artificial Seqence
  Synthetic siRNA antisense strand against b2GPI
uaccaaagugguuuucgucug

SEQ ID NO: 1198 - RNA, 21 nt, Artificial Seqence
  Synthetic siRNA antisense strand against b2GPI
cuaccaaagugguuuucgucu

SEQ ID NO: 1199 - RNA, 21 nt, Artificial Seqence
  Synthetic siRNA antisense strand against b2GPI
acuaccaaagugguuuucguc

SEQ ID NO: 1200 - RNA, 21 nt, Artificial Seqence
  Synthetic siRNA antisense strand against b2GPI
cacuaccaaagugguuuucgu

SEQ ID NO: 1201 - RNA, 21 nt, Artificial Seqence
  Synthetic siRNA antisense strand against b2GPI
gcacuaccaaagugguuuucg

SEQ ID NO: 1202 - RNA, 21 nt, Artificial Seqence
  Synthetic siRNA antisense strand against b2GPI
ggcacuaccaaagugguuuuc

SEQ ID NO: 1203 - RNA, 21 nt, Artificial Seqence
  Synthetic siRNA antisense strand against b2GPI
uggcacuaccaaagugguuuu

SEQ ID NO: 1204 - RNA, 21 nt, Artificial Seqence
  Synthetic siRNA antisense strand against b2GPI
cuggcacuaccaaagugguuu

SEQ ID NO: 1205 - RNA, 21 nt, Artificial Seqence
  Synthetic siRNA antisense strand against b2GPI
acuggcacuaccaaagugguu

SEQ ID NO: 1206 - RNA, 21 nt, Artificial Seqence
  Synthetic siRNA antisense strand against b2GPI
cacuggcacuaccaaaguggu

SEQ ID NO: 1207 - RNA, 21 nt, Artificial Seqence
  Synthetic siRNA antisense strand against b2GPI
acacuggcacuaccaaagugg

SEQ ID NO: 1208 - RNA, 21 nt, Artificial Seqence
  Synthetic siRNA antisense strand against b2GPI
cacacuggcacuaccaaagug

SEQ ID NO: 1209 - RNA, 21 nt, Artificial Seqence
  Synthetic siRNA antisense strand against b2GPI
ucacacuggcacuaccaaagu

SEQ ID NO: 1210 - RNA, 21 nt, Artificial Seqence
  Synthetic siRNA antisense strand against b2GPI
gucacacuggcacuaccaaag

SEQ ID NO: 1211 - RNA, 21 nt, Artificial Seqence
  Synthetic siRNA antisense strand against b2GPI
agucacacuggcacuaccaaa

SEQ ID NO: 1212 - RNA, 21 nt, Artificial Seqence
  Synthetic siRNA antisense strand against b2GPI
gagucacacuggcacuaccaa

SEQ ID NO: 1213 - RNA, 21 nt, Artificial Seqence
  Synthetic siRNA antisense strand against b2GPI
ugagucacacuggcacuacca

SEQ ID NO: 1214 - RNA, 21 nt, Artificial Seqence
  Synthetic siRNA antisense strand against b2GPI
augagucacacuggcacuacc

SEQ ID NO: 1215 - RNA, 21 nt, Artificial Seqence
  Synthetic siRNA antisense strand against b2GPI
gaugagucacacuggcacuac

SEQ ID NO: 1216 - RNA, 21 nt, Artificial Seqence
  Synthetic siRNA antisense strand against b2GPI
ggaugagucacacuggcacua

SEQ ID NO: 1217 - RNA, 21 nt, Artificial Seqence
  Synthetic siRNA antisense strand against b2GPI
uggaugagucacacuggcacu

SEQ ID NO: 1218 - RNA, 21 nt, Artificial Seqence
  Synthetic siRNA antisense strand against b2GPI
guggaugagucacacuggcac

SEQ ID NO: 1219 - RNA, 21 nt, Artificial Seqence
  Synthetic siRNA antisense strand against b2GPI
uguggaugagucacacuggca

SEQ ID NO: 1220 - RNA, 21 nt, Artificial Seqence
  Synthetic siRNA antisense strand against b2GPI
uuguggaugagucacacuggc

SEQ ID NO: 1221 - RNA, 21 nt, Artificial Seqence
  Synthetic siRNA antisense strand against b2GPI
auuguggaugagucacacugg

SEQ ID NO: 1222 - RNA, 21 nt, Artificial Seqence
  Synthetic siRNA antisense strand against b2GPI
cauuguggaugagucacacug

SEQ ID NO: 1223 - RNA, 21 nt, Artificial Seqence
  Synthetic siRNA antisense strand against b2GPI
ucauuguggaugagucacacu

SEQ ID NO: 1224 - RNA, 21 nt, Artificial Seqence
  Synthetic siRNA antisense strand against b2GPI
aucauuguggaugagucacac

SEQ ID NO: 1225 - RNA, 21 nt, Artificial Seqence
  Synthetic siRNA antisense strand against b2GPI
aaucauuguggaugagucaca

SEQ ID NO: 1226 - RNA, 21 nt, Artificial Seqence
  Synthetic siRNA antisense strand against b2GPI
aaaucauuguggaugagucac

SEQ ID NO: 1227 - RNA, 21 nt, Artificial Seqence
  Synthetic siRNA antisense strand against b2GPI
gaaaucauuguggaugaguca

SEQ ID NO: 1228 - RNA, 21 nt, Artificial Seqence
  Synthetic siRNA antisense strand against b2GPI
agaaaucauuguggaugaguc

SEQ ID NO: 1229 - RNA, 21 nt, Artificial Seqence
  Synthetic siRNA antisense strand against b2GPI
gagaaaucauuguggaugagu

SEQ ID NO: 1230 - RNA, 21 nt, Artificial Seqence
  Synthetic siRNA antisense strand against b2GPI
ggagaaaucauuguggaugag

SEQ ID NO: 1231 - RNA, 21 nt, Artificial Seqence
  Synthetic siRNA antisense strand against b2GPI
uggagaaaucauuguggauga

SEQ ID NO: 1232 - RNA, 21 nt, Artificial Seqence
  Synthetic siRNA antisense strand against b2GPI
cuggagaaaucauuguggaug

SEQ ID NO: 1233 - RNA, 21 nt, Artificial Seqence
  Synthetic siRNA antisense strand against b2GPI
acuggagaaaucauuguggau

SEQ ID NO: 1234 - RNA, 21 nt, Artificial Seqence
  Synthetic siRNA antisense strand against b2GPI
cacuggagaaaucauugugga

SEQ ID NO: 1235 - RNA, 21 nt, Artificial Seqence
  Synthetic siRNA antisense strand against b2GPI
gcacuggagaaaucauugugg

SEQ ID NO: 1236 - RNA, 21 nt, Artificial Seqence
  Synthetic siRNA antisense strand against b2GPI
agcacuggagaaaucauugug

SEQ ID NO: 1237 - RNA, 21 nt, Artificial Seqence
  Synthetic siRNA antisense strand against b2GPI
gagcacuggagaaaucauugu

SEQ ID NO: 1238 - RNA, 21 nt, Artificial Seqence
  Synthetic siRNA antisense strand against b2GPI
ugagcacuggagaaaucauug

SEQ ID NO: 1239 - RNA, 21 nt, Artificial Seqence
  Synthetic siRNA antisense strand against b2GPI
augagcacuggagaaaucauu

SEQ ID NO: 1240 - RNA, 21 nt, Artificial Seqence
  Synthetic siRNA antisense strand against b2GPI
gaugagcacuggagaaaucau

SEQ ID NO: 1241 - RNA, 21 nt, Artificial Seqence
  Synthetic siRNA antisense strand against b2GPI
agaugagcacuggagaaauca

SEQ ID NO: 1242 - RNA, 21 nt, Artificial Seqence
  Synthetic siRNA antisense strand against b2GPI
aagaugagcacuggagaaauc

SEQ ID NO: 1243 - RNA, 21 nt, Artificial Seqence
  Synthetic siRNA antisense strand against b2GPI
caagaugagcacuggagaaau

SEQ ID NO: 1244 - RNA, 21 nt, Artificial Seqence
  Synthetic siRNA antisense strand against b2GPI
acaagaugagcacuggagaaa

SEQ ID NO: 1245 - RNA, 21 nt, Artificial Seqence
  Synthetic siRNA antisense strand against b2GPI
aacaagaugagcacuggagaa

SEQ ID NO: 1246 - RNA, 21 nt, Artificial Seqence
  Synthetic siRNA antisense strand against b2GPI
gaacaagaugagcacuggaga

SEQ ID NO: 1247 - RNA, 21 nt, Artificial Seqence
  Synthetic siRNA antisense strand against b2GPI
agaacaagaugagcacuggag

SEQ ID NO: 1248 - RNA, 21 nt, Artificial Seqence
  Synthetic siRNA antisense strand against b2GPI
gagaacaagaugagcacugga

SEQ ID NO: 1249 - RNA, 21 nt, Artificial Seqence
  Synthetic siRNA antisense strand against b2GPI
cgagaacaagaugagcacugg

SEQ ID NO: 1250 - RNA, 21 nt, Artificial Seqence
  Synthetic siRNA antisense strand against b2GPI
ucgagaacaagaugagcacug

SEQ ID NO: 1251 - RNA, 21 nt, Artificial Seqence
  Synthetic siRNA antisense strand against b2GPI
cucgagaacaagaugagcacu

SEQ ID NO: 1252 - RNA, 21 nt, Artificial Seqence
  Synthetic siRNA antisense strand against b2GPI
acucgagaacaagaugagcac

SEQ ID NO: 1253 - RNA, 21 nt, Artificial Seqence
  Synthetic siRNA antisense strand against b2GPI
aacucgagaacaagaugagca

SEQ ID NO: 1254 - RNA, 21 nt, Artificial Seqence
  Synthetic siRNA antisense strand against b2GPI
aaacucgagaacaagaugagc

SEQ ID NO: 1255 - RNA, 21 nt, Artificial Seqence
  Synthetic siRNA antisense strand against b2GPI
aaaacucgagaacaagaugag

SEQ ID NO: 1256 - RNA, 21 nt, Artificial Seqence
  Synthetic siRNA antisense strand against b2GPI
gaaaacucgagaacaagauga

SEQ ID NO: 1257 - RNA, 21 nt, Artificial Seqence
  Synthetic siRNA antisense strand against b2GPI
agaaaacucgagaacaagaug

SEQ ID NO: 1258 - RNA, 21 nt, Artificial Seqence
  Synthetic siRNA antisense strand against b2GPI
gagaaaacucgagaacaagau

SEQ ID NO: 1259 - RNA, 21 nt, Artificial Seqence
  Synthetic siRNA antisense strand against b2GPI
agagaaaacucgagaacaaga

SEQ ID NO: 1260 - RNA, 21 nt, Artificial Seqence
  Synthetic siRNA antisense strand against b2GPI
cagagaaaacucgagaacaag

SEQ ID NO: 1261 - RNA, 21 nt, Artificial Seqence
  Synthetic siRNA antisense strand against b2GPI
gcagagaaaacucgagaacaa

SEQ ID NO: 1262 - RNA, 21 nt, Artificial Seqence
  Synthetic siRNA antisense strand against b2GPI
ggcagagaaaacucgagaaca

SEQ ID NO: 1263 - RNA, 21 nt, Artificial Seqence
  Synthetic siRNA antisense strand against b2GPI
uggcagagaaaacucgagaac

SEQ ID NO: 1264 - RNA, 21 nt, Artificial Seqence
  Synthetic siRNA antisense strand against b2GPI
auggcagagaaaacucgagaa

SEQ ID NO: 1265 - RNA, 21 nt, Artificial Seqence
  Synthetic siRNA antisense strand against b2GPI
cauggcagagaaaacucgaga

SEQ ID NO: 1266 - RNA, 21 nt, Artificial Seqence
  Synthetic siRNA antisense strand against b2GPI
acauggcagagaaaacucgag

SEQ ID NO: 1267 - RNA, 21 nt, Artificial Seqence
  Synthetic siRNA antisense strand against b2GPI
aacauggcagagaaaacucga

SEQ ID NO: 1268 - RNA, 21 nt, Artificial Seqence
  Synthetic siRNA antisense strand against b2GPI
caacauggcagagaaaacucg

SEQ ID NO: 1269 - RNA, 21 nt, Artificial Seqence
  Synthetic siRNA antisense strand against b2GPI
gcaacauggcagagaaaacuc

SEQ ID NO: 1270 - RNA, 21 nt, Artificial Seqence
  Synthetic siRNA antisense strand against b2GPI
agcaacauggcagagaaaacu

SEQ ID NO: 1271 - RNA, 21 nt, Artificial Seqence
  Synthetic siRNA antisense strand against b2GPI
uagcaacauggcagagaaaac

SEQ ID NO: 1272 - RNA, 21 nt, Artificial Seqence
  Synthetic siRNA antisense strand against b2GPI
auagcaacauggcagagaaaa

SEQ ID NO: 1273 - RNA, 21 nt, Artificial Seqence
  Synthetic siRNA antisense strand against b2GPI
aauagcaacauggcagagaaa

SEQ ID NO: 1274 - RNA, 21 nt, Artificial Seqence
  Synthetic siRNA antisense strand against b2GPI
caauagcaacauggcagagaa

SEQ ID NO: 1275 - RNA, 21 nt, Artificial Seqence
  Synthetic siRNA antisense strand against b2GPI
gcaauagcaacauggcagaga

SEQ ID NO: 1276 - RNA, 21 nt, Artificial Seqence
  Synthetic siRNA antisense strand against b2GPI
ugcaauagcaacauggcagag

SEQ ID NO: 1277 - RNA, 21 nt, Artificial Seqence
  Synthetic siRNA antisense strand against b2GPI
cugcaauagcaacauggcaga

SEQ ID NO: 1278 - RNA, 21 nt, Artificial Seqence
  Synthetic siRNA antisense strand against b2GPI
ccugcaauagcaacauggcag

SEQ ID NO: 1279 - RNA, 21 nt, Artificial Seqence
  Synthetic siRNA antisense strand against b2GPI
uccugcaauagcaacauggca

SEQ ID NO: 1280 - RNA, 21 nt, Artificial Seqence
  Synthetic siRNA antisense strand against b2GPI
guccugcaauagcaacauggc

SEQ ID NO: 1281 - RNA, 21 nt, Artificial Seqence
  Synthetic siRNA antisense strand against b2GPI
cguccugcaauagcaacaugg

SEQ ID NO: 1282 - RNA, 21 nt, Artificial Seqence
  Synthetic siRNA antisense strand against b2GPI
ccguccugcaauagcaacaug

SEQ ID NO: 1283 - RNA, 21 nt, Artificial Seqence
  Synthetic siRNA antisense strand against b2GPI
uccguccugcaauagcaacau

SEQ ID NO: 1284 - RNA, 21 nt, Artificial Seqence
  Synthetic siRNA antisense strand against b2GPI
guccguccugcaauagcaaca

SEQ ID NO: 1285 - RNA, 21 nt, Artificial Seqence
  Synthetic siRNA antisense strand against b2GPI
gguccguccugcaauagcaac

SEQ ID NO: 1286 - RNA, 21 nt, Artificial Seqence
  Synthetic siRNA antisense strand against b2GPI
agguccguccugcaauagcaa

SEQ ID NO: 1287 - RNA, 21 nt, Artificial Seqence
  Synthetic siRNA antisense strand against b2GPI
cagguccguccugcaauagca

SEQ ID NO: 1288 - RNA, 21 nt, Artificial Seqence
  Synthetic siRNA antisense strand against b2GPI
acagguccguccugcaauagc

SEQ ID NO: 1289 - RNA, 21 nt, Artificial Seqence
  Synthetic siRNA antisense strand against b2GPI
gacagguccguccugcaauag

SEQ ID NO: 1290 - RNA, 21 nt, Artificial Seqence
  Synthetic siRNA antisense strand against b2GPI
ggacagguccguccugcaaua

SEQ ID NO: 1291 - RNA, 21 nt, Artificial Seqence
  Synthetic siRNA antisense strand against b2GPI
gggacagguccguccugcaau

SEQ ID NO: 1292 - RNA, 21 nt, Artificial Seqence
  Synthetic siRNA antisense strand against b2GPI
ugggacagguccguccugcaa

SEQ ID NO: 1293 - RNA, 21 nt, Artificial Seqence
  Synthetic siRNA antisense strand against b2GPI
uugggacagguccguccugca

SEQ ID NO: 1294 - RNA, 21 nt, Artificial Seqence
  Synthetic siRNA antisense strand against b2GPI
cuugggacagguccguccugc

SEQ ID NO: 1295 - RNA, 21 nt, Artificial Seqence
  Synthetic siRNA antisense strand against b2GPI
gcuugggacagguccguccug

SEQ ID NO: 1296 - RNA, 21 nt, Artificial Seqence
  Synthetic siRNA antisense strand against b2GPI
ggcuugggacagguccguccu

SEQ ID NO: 1297 - RNA, 21 nt, Artificial Seqence
  Synthetic siRNA antisense strand against b2GPI
uggcuugggacagguccgucc

SEQ ID NO: 1298 - RNA, 21 nt, Artificial Seqence
  Synthetic siRNA antisense strand against b2GPI
cuggcuugggacagguccguc

SEQ ID NO: 1299 - RNA, 21 nt, Artificial Seqence
  Synthetic siRNA antisense strand against b2GPI
ucuggcuugggacagguccgu

SEQ ID NO: 1300 - RNA, 21 nt, Artificial Seqence
  Synthetic siRNA antisense strand against b2GPI
aucuggcuugggacagguccg

SEQ ID NO: 1301 - RNA, 21 nt, Artificial Seqence
  Synthetic siRNA antisense strand against b2GPI
caucuggcuugggacaggucc

SEQ ID NO: 1302 - RNA, 21 nt, Artificial Seqence
  Synthetic siRNA antisense strand against b2GPI
ucaucuggcuugggacagguc

SEQ ID NO: 1303 - RNA, 21 nt, Artificial Seqence
  Synthetic siRNA antisense strand against b2GPI
aucaucuggcuugggacaggu

SEQ ID NO: 1304 - RNA, 21 nt, Artificial Seqence
  Synthetic siRNA antisense strand against b2GPI
aaucaucuggcuugggacagg

SEQ ID NO: 1305 - RNA, 21 nt, Artificial Seqence
  Synthetic siRNA antisense strand against b2GPI
aaaucaucuggcuugggacag

SEQ ID NO: 1306 - RNA, 21 nt, Artificial Seqence
  Synthetic siRNA antisense strand against b2GPI
uaaaucaucuggcuugggaca

SEQ ID NO: 1307 - RNA, 21 nt, Artificial Seqence
  Synthetic siRNA antisense strand against b2GPI
guaaaucaucuggcuugggac

SEQ ID NO: 1308 - RNA, 21 nt, Artificial Seqence
  Synthetic siRNA antisense strand against b2GPI
gguaaaucaucuggcuuggga

SEQ ID NO: 1309 - RNA, 21 nt, Artificial Seqence
  Synthetic siRNA antisense strand against b2GPI
ugguaaaucaucuggcuuggg

SEQ ID NO: 1310 - RNA, 21 nt, Artificial Seqence
  Synthetic siRNA antisense strand against b2GPI
augguaaaucaucuggcuugg

SEQ ID NO: 1311 - RNA, 21 nt, Artificial Seqence
  Synthetic siRNA antisense strand against b2GPI
aaugguaaaucaucuggcuug

SEQ ID NO: 1312 - RNA, 21 nt, Artificial Seqence
  Synthetic siRNA antisense strand against b2GPI
aaaugguaaaucaucuggcuu

SEQ ID NO: 1313 - RNA, 21 nt, Artificial Seqence
  Synthetic siRNA antisense strand against b2GPI
aaaaugguaaaucaucuggcu

SEQ ID NO: 1314 - RNA, 21 nt, Artificial Seqence
  Synthetic siRNA antisense strand against b2GPI
gaaaaugguaaaucaucuggc

SEQ ID NO: 1315 - RNA, 21 nt, Artificial Seqence
  Synthetic siRNA antisense strand against b2GPI
ggaaaaugguaaaucaucugg

SEQ ID NO: 1316 - RNA, 21 nt, Artificial Seqence
  Synthetic siRNA antisense strand against b2GPI
uggaaaaugguaaaucaucug

SEQ ID NO: 1317 - RNA, 21 nt, Artificial Seqence
  Synthetic siRNA antisense strand against b2GPI
guggaaaaugguaaaucaucu

SEQ ID NO: 1318 - RNA, 21 nt, Artificial Seqence
  Synthetic siRNA antisense strand against b2GPI
uguggaaaaugguaaaucauc

SEQ ID NO: 1319 - RNA, 21 nt, Artificial Seqence
  Synthetic siRNA antisense strand against b2GPI
cuguggaaaaugguaaaucau

SEQ ID NO: 1320 - RNA, 21 nt, Artificial Seqence
  Synthetic siRNA antisense strand against b2GPI
acuguggaaaaugguaaauca

SEQ ID NO: 1321 - RNA, 21 nt, Artificial Seqence
  Synthetic siRNA antisense strand against b2GPI
cacuguggaaaaugguaaauc

SEQ ID NO: 1322 - RNA, 21 nt, Artificial Seqence
  Synthetic siRNA antisense strand against b2GPI
ccacuguggaaaaugguaaau

SEQ ID NO: 1323 - RNA, 21 nt, Artificial Seqence
  Synthetic siRNA antisense strand against b2GPI
accacuguggaaaaugguaaa

SEQ ID NO: 1324 - RNA, 21 nt, Artificial Seqence
  Synthetic siRNA antisense strand against b2GPI
gaccacuguggaaaaugguaa

SEQ ID NO: 1325 - RNA, 21 nt, Artificial Seqence
  Synthetic siRNA antisense strand against b2GPI
ggaccacuguggaaaauggua

SEQ ID NO: 1326 - RNA, 21 nt, Artificial Seqence
  Synthetic siRNA antisense strand against b2GPI
gggaccacuguggaaaauggu

SEQ ID NO: 1327 - RNA, 21 nt, Artificial Seqence
  Synthetic siRNA antisense strand against b2GPI
cgggaccacuguggaaaaugg

SEQ ID NO: 1328 - RNA, 21 nt, Artificial Seqence
  Synthetic siRNA antisense strand against b2GPI
acgggaccacuguggaaaaug

SEQ ID NO: 1329 - RNA, 21 nt, Artificial Seqence
  Synthetic siRNA antisense strand against b2GPI
aacgggaccacuguggaaaau

SEQ ID NO: 1330 - RNA, 21 nt, Artificial Seqence
  Synthetic siRNA antisense strand against b2GPI
uaacgggaccacuguggaaaa

SEQ ID NO: 1331 - RNA, 21 nt, Artificial Seqence
  Synthetic siRNA antisense strand against b2GPI
uuaacgggaccacuguggaaa

SEQ ID NO: 1332 - RNA, 21 nt, Artificial Seqence
  Synthetic siRNA antisense strand against b2GPI
uuuaacgggaccacuguggaa

SEQ ID NO: 1333 - RNA, 21 nt, Artificial Seqence
  Synthetic siRNA antisense strand against b2GPI
uuuuaacgggaccacugugga

SEQ ID NO: 1334 - RNA, 21 nt, Artificial Seqence
  Synthetic siRNA antisense strand against b2GPI
uuuuuaacgggaccacugugg

SEQ ID NO: 1335 - RNA, 21 nt, Artificial Seqence
  Synthetic siRNA antisense strand against b2GPI
guuuuuaacgggaccacugug

SEQ ID NO: 1336 - RNA, 21 nt, Artificial Seqence
  Synthetic siRNA antisense strand against b2GPI
uguuuuuaacgggaccacugu

SEQ ID NO: 1337 - RNA, 21 nt, Artificial Seqence
  Synthetic siRNA antisense strand against b2GPI
auguuuuuaacgggaccacug

SEQ ID NO: 1338 - RNA, 21 nt, Artificial Seqence
  Synthetic siRNA antisense strand against b2GPI
aauguuuuuaacgggaccacu

SEQ ID NO: 1339 - RNA, 21 nt, Artificial Seqence
  Synthetic siRNA antisense strand against b2GPI
gaauguuuuuaacgggaccac

SEQ ID NO: 1340 - RNA, 21 nt, Artificial Seqence
  Synthetic siRNA antisense strand against b2GPI
agaauguuuuuaacgggacca

SEQ ID NO: 1341 - RNA, 21 nt, Artificial Seqence
  Synthetic siRNA antisense strand against b2GPI
uagaauguuuuuaacgggacc

SEQ ID NO: 1342 - RNA, 21 nt, Artificial Seqence
  Synthetic siRNA antisense strand against b2GPI
auagaauguuuuuaacgggac

SEQ ID NO: 1343 - RNA, 21 nt, Artificial Seqence
  Synthetic siRNA antisense strand against b2GPI
cauagaauguuuuuaacggga

SEQ ID NO: 1344 - RNA, 21 nt, Artificial Seqence
  Synthetic siRNA antisense strand against b2GPI
ucauagaauguuuuuaacggg

SEQ ID NO: 1345 - RNA, 21 nt, Artificial Seqence
  Synthetic siRNA antisense strand against b2GPI
cucauagaauguuuuuaacgg

SEQ ID NO: 1346 - RNA, 21 nt, Artificial Seqence
  Synthetic siRNA antisense strand against b2GPI
gcucauagaauguuuuuaacg

SEQ ID NO: 1347 - RNA, 21 nt, Artificial Seqence
  Synthetic siRNA antisense strand against b2GPI
ggcucauagaauguuuuuaac

SEQ ID NO: 1348 - RNA, 21 nt, Artificial Seqence
  Synthetic siRNA antisense strand against b2GPI
uggcucauagaauguuuuuaa

SEQ ID NO: 1349 - RNA, 21 nt, Artificial Seqence
  Synthetic siRNA antisense strand against b2GPI
cuggcucauagaauguuuuua

SEQ ID NO: 1350 - RNA, 21 nt, Artificial Seqence
  Synthetic siRNA antisense strand against b2GPI
ccuggcucauagaauguuuuu

SEQ ID NO: 1351 - RNA, 21 nt, Artificial Seqence
  Synthetic siRNA antisense strand against b2GPI
uccuggcucauagaauguuuu

SEQ ID NO: 1352 - RNA, 21 nt, Artificial Seqence
  Synthetic siRNA antisense strand against b2GPI
cuccuggcucauagaauguuu

SEQ ID NO: 1353 - RNA, 21 nt, Artificial Seqence
  Synthetic siRNA antisense strand against b2GPI
ucuccuggcucauagaauguu

SEQ ID NO: 1354 - RNA, 21 nt, Artificial Seqence
  Synthetic siRNA antisense strand against b2GPI
uucuccuggcucauagaaugu

SEQ ID NO: 1355 - RNA, 21 nt, Artificial Seqence
  Synthetic siRNA antisense strand against b2GPI
cuucuccuggcucauagaaug

SEQ ID NO: 1356 - RNA, 21 nt, Artificial Seqence
  Synthetic siRNA antisense strand against b2GPI
ucuucuccuggcucauagaau

SEQ ID NO: 1357 - RNA, 21 nt, Artificial Seqence
  Synthetic siRNA antisense strand against b2GPI
cucuucuccuggcucauagaa

SEQ ID NO: 1358 - RNA, 21 nt, Artificial Seqence
  Synthetic siRNA antisense strand against b2GPI
ucucuucuccuggcucauaga

SEQ ID NO: 1359 - RNA, 21 nt, Artificial Seqence
  Synthetic siRNA antisense strand against b2GPI
aucucuucuccuggcucauag

SEQ ID NO: 1360 - RNA, 21 nt, Artificial Seqence
  Synthetic siRNA antisense strand against b2GPI
aaucucuucuccuggcucaua

SEQ ID NO: 1361 - RNA, 21 nt, Artificial Seqence
  Synthetic siRNA antisense strand against b2GPI
uaaucucuucuccuggcucau

SEQ ID NO: 1362 - RNA, 21 nt, Artificial Seqence
  Synthetic siRNA antisense strand against b2GPI
guaaucucuucuccuggcuca

SEQ ID NO: 1363 - RNA, 21 nt, Artificial Seqence
  Synthetic siRNA antisense strand against b2GPI
cguaaucucuucuccuggcuc

SEQ ID NO: 1364 - RNA, 21 nt, Artificial Seqence
  Synthetic siRNA antisense strand against b2GPI
acguaaucucuucuccuggcu

SEQ ID NO: 1365 - RNA, 21 nt, Artificial Seqence
  Synthetic siRNA antisense strand against b2GPI
uacguaaucucuucuccuggc

SEQ ID NO: 1366 - RNA, 21 nt, Artificial Seqence
  Synthetic siRNA antisense strand against b2GPI
auacguaaucucuucuccugg

SEQ ID NO: 1367 - RNA, 21 nt, Artificial Seqence
  Synthetic siRNA antisense strand against b2GPI
aauacguaaucucuucuccug

SEQ ID NO: 1368 - RNA, 21 nt, Artificial Seqence
  Synthetic siRNA antisense strand against b2GPI
gaauacguaaucucuucuccu

SEQ ID NO: 1369 - RNA, 21 nt, Artificial Seqence
  Synthetic siRNA antisense strand against b2GPI
ggaauacguaaucucuucucc

SEQ ID NO: 1370 - RNA, 21 nt, Artificial Seqence
  Synthetic siRNA antisense strand against b2GPI
aggaauacguaaucucuucuc

SEQ ID NO: 1371 - RNA, 21 nt, Artificial Seqence
  Synthetic siRNA antisense strand against b2GPI
caggaauacguaaucucuucu

SEQ ID NO: 1372 - RNA, 21 nt, Artificial Seqence
  Synthetic siRNA antisense strand against b2GPI
gcaggaauacguaaucucuuc

SEQ ID NO: 1373 - RNA, 21 nt, Artificial Seqence
  Synthetic siRNA antisense strand against b2GPI
ugcaggaauacguaaucucuu

SEQ ID NO: 1374 - RNA, 21 nt, Artificial Seqence
  Synthetic siRNA antisense strand against b2GPI
uugcaggaauacguaaucucu

SEQ ID NO: 1375 - RNA, 21 nt, Artificial Seqence
  Synthetic siRNA antisense strand against b2GPI
cuugcaggaauacguaaucuc

SEQ ID NO: 1376 - RNA, 21 nt, Artificial Seqence
  Synthetic siRNA antisense strand against b2GPI
gcuugcaggaauacguaaucu

SEQ ID NO: 1377 - RNA, 21 nt, Artificial Seqence
  Synthetic siRNA antisense strand against b2GPI
ggcuugcaggaauacguaauc

SEQ ID NO: 1378 - RNA, 21 nt, Artificial Seqence
  Synthetic siRNA antisense strand against b2GPI
cggcuugcaggaauacguaau

SEQ ID NO: 1379 - RNA, 21 nt, Artificial Seqence
  Synthetic siRNA antisense strand against b2GPI
ccggcuugcaggaauacguaa

SEQ ID NO: 1380 - RNA, 21 nt, Artificial Seqence
  Synthetic siRNA antisense strand against b2GPI
cccggcuugcaggaauacgua

SEQ ID NO: 1381 - RNA, 21 nt, Artificial Seqence
  Synthetic siRNA antisense strand against b2GPI
gcccggcuugcaggaauacgu

SEQ ID NO: 1382 - RNA, 21 nt, Artificial Seqence
  Synthetic siRNA antisense strand against b2GPI
agcccggcuugcaggaauacg

SEQ ID NO: 1383 - RNA, 21 nt, Artificial Seqence
  Synthetic siRNA antisense strand against b2GPI
uagcccggcuugcaggaauac

SEQ ID NO: 1384 - RNA, 21 nt, Artificial Seqence
  Synthetic siRNA antisense strand against b2GPI
auagcccggcuugcaggaaua

SEQ ID NO: 1385 - RNA, 21 nt, Artificial Seqence
  Synthetic siRNA antisense strand against b2GPI
cauagcccggcuugcaggaau

SEQ ID NO: 1386 - RNA, 21 nt, Artificial Seqence
  Synthetic siRNA antisense strand against b2GPI
acauagcccggcuugcaggaa

SEQ ID NO: 1387 - RNA, 21 nt, Artificial Seqence
  Synthetic siRNA antisense strand against b2GPI
cacauagcccggcuugcagga

SEQ ID NO: 1388 - RNA, 21 nt, Artificial Seqence
  Synthetic siRNA antisense strand against b2GPI
acacauagcccggcuugcagg

SEQ ID NO: 1389 - RNA, 21 nt, Artificial Seqence
  Synthetic siRNA antisense strand against b2GPI
gacacauagcccggcuugcag

SEQ ID NO: 1390 - RNA, 21 nt, Artificial Seqence
  Synthetic siRNA antisense strand against b2GPI
ggacacauagcccggcuugca

SEQ ID NO: 1391 - RNA, 21 nt, Artificial Seqence
  Synthetic siRNA antisense strand against b2GPI
gggacacauagcccggcuugc

SEQ ID NO: 1392 - RNA, 21 nt, Artificial Seqence
  Synthetic siRNA antisense strand against b2GPI
cgggacacauagcccggcuug

SEQ ID NO: 1393 - RNA, 21 nt, Artificial Seqence
  Synthetic siRNA antisense strand against b2GPI
ucgggacacauagcccggcuu

SEQ ID NO: 1394 - RNA, 21 nt, Artificial Seqence
  Synthetic siRNA antisense strand against b2GPI
cucgggacacauagcccggcu

SEQ ID NO: 1395 - RNA, 21 nt, Artificial Seqence
  Synthetic siRNA antisense strand against b2GPI
ccucgggacacauagcccggc

SEQ ID NO: 1396 - RNA, 21 nt, Artificial Seqence
  Synthetic siRNA antisense strand against b2GPI
uccucgggacacauagcccgg

SEQ ID NO: 1397 - RNA, 21 nt, Artificial Seqence
  Synthetic siRNA antisense strand against b2GPI
cuccucgggacacauagcccg

SEQ ID NO: 1398 - RNA, 21 nt, Artificial Seqence
  Synthetic siRNA antisense strand against b2GPI
ccuccucgggacacauagccc

SEQ ID NO: 1399 - RNA, 21 nt, Artificial Seqence
  Synthetic siRNA antisense strand against b2GPI
cccuccucgggacacauagcc

SEQ ID NO: 1400 - RNA, 21 nt, Artificial Seqence
  Synthetic siRNA antisense strand against b2GPI
ucccuccucgggacacauagc

SEQ ID NO: 1401 - RNA, 21 nt, Artificial Seqence
  Synthetic siRNA antisense strand against b2GPI
aucccuccucgggacacauag

SEQ ID NO: 1402 - RNA, 21 nt, Artificial Seqence
  Synthetic siRNA antisense strand against b2GPI
caucccuccucgggacacaua

SEQ ID NO: 1403 - RNA, 21 nt, Artificial Seqence
  Synthetic siRNA antisense strand against b2GPI
ucaucccuccucgggacacau

SEQ ID NO: 1404 - RNA, 21 nt, Artificial Seqence
  Synthetic siRNA antisense strand against b2GPI
cucaucccuccucgggacaca

SEQ ID NO: 1405 - RNA, 21 nt, Artificial Seqence
  Synthetic siRNA antisense strand against b2GPI
ucucaucccuccucgggacac

SEQ ID NO: 1406 - RNA, 21 nt, Artificial Seqence
  Synthetic siRNA antisense strand against b2GPI
uucucaucccuccucgggaca

SEQ ID NO: 1407 - RNA, 21 nt, Artificial Seqence
  Synthetic siRNA antisense strand against b2GPI
uuucucaucccuccucgggac

SEQ ID NO: 1408 - RNA, 21 nt, Artificial Seqence
  Synthetic siRNA antisense strand against b2GPI
cuuucucaucccuccucggga

SEQ ID NO: 1409 - RNA, 21 nt, Artificial Seqence
  Synthetic siRNA antisense strand against b2GPI
acuuucucaucccuccucggg

SEQ ID NO: 1410 - RNA, 21 nt, Artificial Seqence
  Synthetic siRNA antisense strand against b2GPI
aacuuucucaucccuccucgg

SEQ ID NO: 1411 - RNA, 21 nt, Artificial Seqence
  Synthetic siRNA antisense strand against b2GPI
aaacuuucucaucccuccucg

SEQ ID NO: 1412 - RNA, 21 nt, Artificial Seqence
  Synthetic siRNA antisense strand against b2GPI
uaaacuuucucaucccuccuc

SEQ ID NO: 1413 - RNA, 21 nt, Artificial Seqence
  Synthetic siRNA antisense strand against b2GPI
auaaacuuucucaucccuccu

SEQ ID NO: 1414 - RNA, 21 nt, Artificial Seqence
  Synthetic siRNA antisense strand against b2GPI
gauaaacuuucucaucccucc

SEQ ID NO: 1415 - RNA, 21 nt, Artificial Seqence
  Synthetic siRNA antisense strand against b2GPI
agauaaacuuucucaucccuc

SEQ ID NO: 1416 - RNA, 21 nt, Artificial Seqence
  Synthetic siRNA antisense strand against b2GPI
cagauaaacuuucucaucccu

SEQ ID NO: 1417 - RNA, 21 nt, Artificial Seqence
  Synthetic siRNA antisense strand against b2GPI
gcagauaaacuuucucauccc

SEQ ID NO: 1418 - RNA, 21 nt, Artificial Seqence
  Synthetic siRNA antisense strand against b2GPI
ggcagauaaacuuucucaucc

SEQ ID NO: 1419 - RNA, 21 nt, Artificial Seqence
  Synthetic siRNA antisense strand against b2GPI
gggcagauaaacuuucucauc

SEQ ID NO: 1420 - RNA, 21 nt, Artificial Seqence
  Synthetic siRNA antisense strand against b2GPI
agggcagauaaacuuucucau

SEQ ID NO: 1421 - RNA, 21 nt, Artificial Seqence
  Synthetic siRNA antisense strand against b2GPI
gagggcagauaaacuuucuca

SEQ ID NO: 1422 - RNA, 21 nt, Artificial Seqence
  Synthetic siRNA antisense strand against b2GPI
agagggcagauaaacuuucuc

SEQ ID NO: 1423 - RNA, 21 nt, Artificial Seqence
  Synthetic siRNA antisense strand against b2GPI
gagagggcagauaaacuuucu

SEQ ID NO: 1424 - RNA, 21 nt, Artificial Seqence
  Synthetic siRNA antisense strand against b2GPI
ugagagggcagauaaacuuuc

SEQ ID NO: 1425 - RNA, 21 nt, Artificial Seqence
  Synthetic siRNA antisense strand against b2GPI
gugagagggcagauaaacuuu

SEQ ID NO: 1426 - RNA, 21 nt, Artificial Seqence
  Synthetic siRNA antisense strand against b2GPI
ugugagagggcagauaaacuu

SEQ ID NO: 1427 - RNA, 21 nt, Artificial Seqence
  Synthetic siRNA antisense strand against b2GPI
cugugagagggcagauaaacu

SEQ ID NO: 1428 - RNA, 21 nt, Artificial Seqence
  Synthetic siRNA antisense strand against b2GPI
ccugugagagggcagauaaac

SEQ ID NO: 1429 - RNA, 21 nt, Artificial Seqence
  Synthetic siRNA antisense strand against b2GPI
uccugugagagggcagauaaa

SEQ ID NO: 1430 - RNA, 21 nt, Artificial Seqence
  Synthetic siRNA antisense strand against b2GPI
guccugugagagggcagauaa

SEQ ID NO: 1431 - RNA, 21 nt, Artificial Seqence
  Synthetic siRNA antisense strand against b2GPI
aguccugugagagggcagaua

SEQ ID NO: 1432 - RNA, 21 nt, Artificial Seqence
  Synthetic siRNA antisense strand against b2GPI
caguccugugagagggcagau

SEQ ID NO: 1433 - RNA, 21 nt, Artificial Seqence
  Synthetic siRNA antisense strand against b2GPI
acaguccugugagagggcaga

SEQ ID NO: 1434 - RNA, 21 nt, Artificial Seqence
  Synthetic siRNA antisense strand against b2GPI
cacaguccugugagagggcag

SEQ ID NO: 1435 - RNA, 21 nt, Artificial Seqence
  Synthetic siRNA antisense strand against b2GPI
ccacaguccugugagagggca

SEQ ID NO: 1436 - RNA, 21 nt, Artificial Seqence
  Synthetic siRNA antisense strand against b2GPI
gccacaguccugugagagggc

SEQ ID NO: 1437 - RNA, 21 nt, Artificial Seqence
  Synthetic siRNA antisense strand against b2GPI
ggccacaguccugugagaggg

SEQ ID NO: 1438 - RNA, 21 nt, Artificial Seqence
  Synthetic siRNA antisense strand against b2GPI
gggccacaguccugugagagg

SEQ ID NO: 1439 - RNA, 21 nt, Artificial Seqence
  Synthetic siRNA antisense strand against b2GPI
ugggccacaguccugugagag

SEQ ID NO: 1440 - RNA, 21 nt, Artificial Seqence
  Synthetic siRNA antisense strand against b2GPI
augggccacaguccugugaga

SEQ ID NO: 1441 - RNA, 21 nt, Artificial Seqence
  Synthetic siRNA antisense strand against b2GPI
gaugggccacaguccugugag

SEQ ID NO: 1442 - RNA, 21 nt, Artificial Seqence
  Synthetic siRNA antisense strand against b2GPI
ugaugggccacaguccuguga

SEQ ID NO: 1443 - RNA, 21 nt, Artificial Seqence
  Synthetic siRNA antisense strand against b2GPI
uugaugggccacaguccugug

SEQ ID NO: 1444 - RNA, 21 nt, Artificial Seqence
  Synthetic siRNA antisense strand against b2GPI
guugaugggccacaguccugu

SEQ ID NO: 1445 - RNA, 21 nt, Artificial Seqence
  Synthetic siRNA antisense strand against b2GPI
uguugaugggccacaguccug

SEQ ID NO: 1446 - RNA, 21 nt, Artificial Seqence
  Synthetic siRNA antisense strand against b2GPI
guguugaugggccacaguccu

SEQ ID NO: 1447 - RNA, 21 nt, Artificial Seqence
  Synthetic siRNA antisense strand against b2GPI
aguguugaugggccacagucc

SEQ ID NO: 1448 - RNA, 21 nt, Artificial Seqence
  Synthetic siRNA antisense strand against b2GPI
gaguguugaugggccacaguc

SEQ ID NO: 1449 - RNA, 21 nt, Artificial Seqence
  Synthetic siRNA antisense strand against b2GPI
agaguguugaugggccacagu

SEQ ID NO: 1450 - RNA, 21 nt, Artificial Seqence
  Synthetic siRNA antisense strand against b2GPI
cagaguguugaugggccacag

SEQ ID NO: 1451 - RNA, 21 nt, Artificial Seqence
  Synthetic siRNA antisense strand against b2GPI
ucagaguguugaugggccaca

SEQ ID NO: 1452 - RNA, 21 nt, Artificial Seqence
  Synthetic siRNA antisense strand against b2GPI
uucagaguguugaugggccac

SEQ ID NO: 1453 - RNA, 21 nt, Artificial Seqence
  Synthetic siRNA antisense strand against b2GPI
uuucagaguguugaugggcca

SEQ ID NO: 1454 - RNA, 21 nt, Artificial Seqence
  Synthetic siRNA antisense strand against b2GPI
auuucagaguguugaugggcc

SEQ ID NO: 1455 - RNA, 21 nt, Artificial Seqence
  Synthetic siRNA antisense strand against b2GPI
cauuucagaguguugaugggc

SEQ ID NO: 1456 - RNA, 21 nt, Artificial Seqence
  Synthetic siRNA antisense strand against b2GPI
acauuucagaguguugauggg

SEQ ID NO: 1457 - RNA, 21 nt, Artificial Seqence
  Synthetic siRNA antisense strand against b2GPI
uacauuucagaguguugaugg

SEQ ID NO: 1458 - RNA, 21 nt, Artificial Seqence
  Synthetic siRNA antisense strand against b2GPI
guacauuucagaguguugaug

SEQ ID NO: 1459 - RNA, 21 nt, Artificial Seqence
  Synthetic siRNA antisense strand against b2GPI
uguacauuucagaguguugau

SEQ ID NO: 1460 - RNA, 21 nt, Artificial Seqence
  Synthetic siRNA antisense strand against b2GPI
guguacauuucagaguguuga

SEQ ID NO: 1461 - RNA, 21 nt, Artificial Seqence
  Synthetic siRNA antisense strand against b2GPI
gguguacauuucagaguguug

SEQ ID NO: 1462 - RNA, 21 nt, Artificial Seqence
  Synthetic siRNA antisense strand against b2GPI
ggguguacauuucagaguguu

SEQ ID NO: 1463 - RNA, 21 nt, Artificial Seqence
  Synthetic siRNA antisense strand against b2GPI
uggguguacauuucagagugu

SEQ ID NO: 1464 - RNA, 21 nt, Artificial Seqence
  Synthetic siRNA antisense strand against b2GPI
cuggguguacauuucagagug

SEQ ID NO: 1465 - RNA, 21 nt, Artificial Seqence
  Synthetic siRNA antisense strand against b2GPI
ucuggguguacauuucagagu

SEQ ID NO: 1466 - RNA, 21 nt, Artificial Seqence
  Synthetic siRNA antisense strand against b2GPI
cucuggguguacauuucagag

SEQ ID NO: 1467 - RNA, 21 nt, Artificial Seqence
  Synthetic siRNA antisense strand against b2GPI
acucuggguguacauuucaga

SEQ ID NO: 1468 - RNA, 21 nt, Artificial Seqence
  Synthetic siRNA antisense strand against b2GPI
uacucuggguguacauuucag

SEQ ID NO: 1469 - RNA, 21 nt, Artificial Seqence
  Synthetic siRNA antisense strand against b2GPI
auacucuggguguacauuuca

SEQ ID NO: 1470 - RNA, 21 nt, Artificial Seqence
  Synthetic siRNA antisense strand against b2GPI
cauacucuggguguacauuuc

SEQ ID NO: 1471 - RNA, 21 nt, Artificial Seqence
  Synthetic siRNA antisense strand against b2GPI
acauacucuggguguacauuu

SEQ ID NO: 1472 - RNA, 21 nt, Artificial Seqence
  Synthetic siRNA antisense strand against b2GPI
gacauacucuggguguacauu

SEQ ID NO: 1473 - RNA, 21 nt, Artificial Seqence
  Synthetic siRNA antisense strand against b2GPI
ggacauacucuggguguacau

SEQ ID NO: 1474 - RNA, 21 nt, Artificial Seqence
  Synthetic siRNA antisense strand against b2GPI
aggacauacucuggguguaca

SEQ ID NO: 1475 - RNA, 21 nt, Artificial Seqence
  Synthetic siRNA antisense strand against b2GPI
aaggacauacucuggguguac

SEQ ID NO: 1476 - RNA, 21 nt, Artificial Seqence
  Synthetic siRNA antisense strand against b2GPI
aaaggacauacucugggugua

SEQ ID NO: 1477 - RNA, 21 nt, Artificial Seqence
  Synthetic siRNA antisense strand against b2GPI
aaaaggacauacucugggugu

SEQ ID NO: 1478 - RNA, 21 nt, Artificial Seqence
  Synthetic siRNA antisense strand against b2GPI
caaaaggacauacucugggug

SEQ ID NO: 1479 - RNA, 21 nt, Artificial Seqence
  Synthetic siRNA antisense strand against b2GPI
gcaaaaggacauacucugggu

SEQ ID NO: 1480 - RNA, 21 nt, Artificial Seqence
  Synthetic siRNA antisense strand against b2GPI
agcaaaaggacauacucuggg

SEQ ID NO: 1481 - RNA, 21 nt, Artificial Seqence
  Synthetic siRNA antisense strand against b2GPI
cagcaaaaggacauacucugg

SEQ ID NO: 1482 - RNA, 21 nt, Artificial Seqence
  Synthetic siRNA antisense strand against b2GPI
ccagcaaaaggacauacucug

SEQ ID NO: 1483 - RNA, 21 nt, Artificial Seqence
  Synthetic siRNA antisense strand against b2GPI
uccagcaaaaggacauacucu

SEQ ID NO: 1484 - RNA, 21 nt, Artificial Seqence
  Synthetic siRNA antisense strand against b2GPI
uuccagcaaaaggacauacuc

SEQ ID NO: 1485 - RNA, 21 nt, Artificial Seqence
  Synthetic siRNA antisense strand against b2GPI
auuccagcaaaaggacauacu

SEQ ID NO: 1486 - RNA, 21 nt, Artificial Seqence
  Synthetic siRNA antisense strand against b2GPI
gauuccagcaaaaggacauac

SEQ ID NO: 1487 - RNA, 21 nt, Artificial Seqence
  Synthetic siRNA antisense strand against b2GPI
agauuccagcaaaaggacaua

SEQ ID NO: 1488 - RNA, 21 nt, Artificial Seqence
  Synthetic siRNA antisense strand against b2GPI
aagauuccagcaaaaggacau

SEQ ID NO: 1489 - RNA, 21 nt, Artificial Seqence
  Synthetic siRNA antisense strand against b2GPI
uaagauuccagcaaaaggaca

SEQ ID NO: 1490 - RNA, 21 nt, Artificial Seqence
  Synthetic siRNA antisense strand against b2GPI
cuaagauuccagcaaaaggac

SEQ ID NO: 1491 - RNA, 21 nt, Artificial Seqence
  Synthetic siRNA antisense strand against b2GPI
ucuaagauuccagcaaaagga

SEQ ID NO: 1492 - RNA, 21 nt, Artificial Seqence
  Synthetic siRNA antisense strand against b2GPI
uucuaagauuccagcaaaagg

SEQ ID NO: 1493 - RNA, 21 nt, Artificial Seqence
  Synthetic siRNA antisense strand against b2GPI
uuucuaagauuccagcaaaag

SEQ ID NO: 1494 - RNA, 21 nt, Artificial Seqence
  Synthetic siRNA antisense strand against b2GPI
uuuucuaagauuccagcaaaa

SEQ ID NO: 1495 - RNA, 21 nt, Artificial Seqence
  Synthetic siRNA antisense strand against b2GPI
auuuucuaagauuccagcaaa

SEQ ID NO: 1496 - RNA, 21 nt, Artificial Seqence
  Synthetic siRNA antisense strand against b2GPI
cauuuucuaagauuccagcaa

SEQ ID NO: 1497 - RNA, 21 nt, Artificial Seqence
  Synthetic siRNA antisense strand against b2GPI
ccauuuucuaagauuccagca

SEQ ID NO: 1498 - RNA, 21 nt, Artificial Seqence
  Synthetic siRNA antisense strand against b2GPI
uccauuuucuaagauuccagc

SEQ ID NO: 1499 - RNA, 21 nt, Artificial Seqence
  Synthetic siRNA antisense strand against b2GPI
cuccauuuucuaagauuccag

SEQ ID NO: 1500 - RNA, 21 nt, Artificial Seqence
  Synthetic siRNA antisense strand against b2GPI
gcuccauuuucuaagauucca

SEQ ID NO: 1501 - RNA, 21 nt, Artificial Seqence
  Synthetic siRNA antisense strand against b2GPI
ggcuccauuuucuaagauucc

SEQ ID NO: 1502 - RNA, 21 nt, Artificial Seqence
  Synthetic siRNA antisense strand against b2GPI
cggcuccauuuucuaagauuc

SEQ ID NO: 1503 - RNA, 21 nt, Artificial Seqence
  Synthetic siRNA antisense strand against b2GPI
acggcuccauuuucuaagauu

SEQ ID NO: 1504 - RNA, 21 nt, Artificial Seqence
  Synthetic siRNA antisense strand against b2GPI
uacggcuccauuuucuaagau

SEQ ID NO: 1505 - RNA, 21 nt, Artificial Seqence
  Synthetic siRNA antisense strand against b2GPI
guacggcuccauuuucuaaga

SEQ ID NO: 1506 - RNA, 21 nt, Artificial Seqence
  Synthetic siRNA antisense strand against b2GPI
cguacggcuccauuuucuaag

SEQ ID NO: 1507 - RNA, 21 nt, Artificial Seqence
  Synthetic siRNA antisense strand against b2GPI
gcguacggcuccauuuucuaa

SEQ ID NO: 1508 - RNA, 21 nt, Artificial Seqence
  Synthetic siRNA antisense strand against b2GPI
agcguacggcuccauuuucua

SEQ ID NO: 1509 - RNA, 21 nt, Artificial Seqence
  Synthetic siRNA antisense strand against b2GPI
uagcguacggcuccauuuucu

SEQ ID NO: 1510 - RNA, 21 nt, Artificial Seqence
  Synthetic siRNA antisense strand against b2GPI
auagcguacggcuccauuuuc

SEQ ID NO: 1511 - RNA, 21 nt, Artificial Seqence
  Synthetic siRNA antisense strand against b2GPI
uauagcguacggcuccauuuu

SEQ ID NO: 1512 - RNA, 21 nt, Artificial Seqence
  Synthetic siRNA antisense strand against b2GPI
guauagcguacggcuccauuu

SEQ ID NO: 1513 - RNA, 21 nt, Artificial Seqence
  Synthetic siRNA antisense strand against b2GPI
cguauagcguacggcuccauu

SEQ ID NO: 1514 - RNA, 21 nt, Artificial Seqence
  Synthetic siRNA antisense strand against b2GPI
ucguauagcguacggcuccau

SEQ ID NO: 1515 - RNA, 21 nt, Artificial Seqence
  Synthetic siRNA antisense strand against b2GPI
gucguauagcguacggcucca

SEQ ID NO: 1516 - RNA, 21 nt, Artificial Seqence
  Synthetic siRNA antisense strand against b2GPI
agucguauagcguacggcucc

SEQ ID NO: 1517 - RNA, 21 nt, Artificial Seqence
  Synthetic siRNA antisense strand against b2GPI
aagucguauagcguacggcuc

SEQ ID NO: 1518 - RNA, 21 nt, Artificial Seqence
  Synthetic siRNA antisense strand against b2GPI
aaagucguauagcguacggcu

SEQ ID NO: 1519 - RNA, 21 nt, Artificial Seqence
  Synthetic siRNA antisense strand against b2GPI
aaaagucguauagcguacggc

SEQ ID NO: 1520 - RNA, 21 nt, Artificial Seqence
  Synthetic siRNA antisense strand against b2GPI
caaaagucguauagcguacgg

SEQ ID NO: 1521 - RNA, 21 nt, Artificial Seqence
  Synthetic siRNA antisense strand against b2GPI
ucaaaagucguauagcguacg

SEQ ID NO: 1522 - RNA, 21 nt, Artificial Seqence
  Synthetic siRNA antisense strand against b2GPI
uucaaaagucguauagcguac

SEQ ID NO: 1523 - RNA, 21 nt, Artificial Seqence
  Synthetic siRNA antisense strand against b2GPI
auucaaaagucguauagcgua

SEQ ID NO: 1524 - RNA, 21 nt, Artificial Seqence
  Synthetic siRNA antisense strand against b2GPI
uauucaaaagucguauagcgu

SEQ ID NO: 1525 - RNA, 21 nt, Artificial Seqence
  Synthetic siRNA antisense strand against b2GPI
auauucaaaagucguauagcg

SEQ ID NO: 1526 - RNA, 21 nt, Artificial Seqence
  Synthetic siRNA antisense strand against b2GPI
gauauucaaaagucguauagc

SEQ ID NO: 1527 - RNA, 21 nt, Artificial Seqence
  Synthetic siRNA antisense strand against b2GPI
ggauauucaaaagucguauag

SEQ ID NO: 1528 - RNA, 21 nt, Artificial Seqence
  Synthetic siRNA antisense strand against b2GPI
gggauauucaaaagucguaua

SEQ ID NO: 1529 - RNA, 21 nt, Artificial Seqence
  Synthetic siRNA antisense strand against b2GPI
ugggauauucaaaagucguau

SEQ ID NO: 1530 - RNA, 21 nt, Artificial Seqence
  Synthetic siRNA antisense strand against b2GPI
uugggauauucaaaagucgua

SEQ ID NO: 1531 - RNA, 21 nt, Artificial Seqence
  Synthetic siRNA antisense strand against b2GPI
guugggauauucaaaagucgu

SEQ ID NO: 1532 - RNA, 21 nt, Artificial Seqence
  Synthetic siRNA antisense strand against b2GPI
uguugggauauucaaaagucg

SEQ ID NO: 1533 - RNA, 21 nt, Artificial Seqence
  Synthetic siRNA antisense strand against b2GPI
guguugggauauucaaaaguc

SEQ ID NO: 1534 - RNA, 21 nt, Artificial Seqence
  Synthetic siRNA antisense strand against b2GPI
cguguugggauauucaaaagu

SEQ ID NO: 1535 - RNA, 21 nt, Artificial Seqence
  Synthetic siRNA antisense strand against b2GPI
ucguguugggauauucaaaag

SEQ ID NO: 1536 - RNA, 21 nt, Artificial Seqence
  Synthetic siRNA antisense strand against b2GPI
aucguguugggauauucaaaa

SEQ ID NO: 1537 - RNA, 21 nt, Artificial Seqence
  Synthetic siRNA antisense strand against b2GPI
gaucguguugggauauucaaa

SEQ ID NO: 1538 - RNA, 21 nt, Artificial Seqence
  Synthetic siRNA antisense strand against b2GPI
ugaucguguugggauauucaa

SEQ ID NO: 1539 - RNA, 21 nt, Artificial Seqence
  Synthetic siRNA antisense strand against b2GPI
cugaucguguugggauauuca

SEQ ID NO: 1540 - RNA, 21 nt, Artificial Seqence
  Synthetic siRNA antisense strand against b2GPI
acugaucguguugggauauuc

SEQ ID NO: 1541 - RNA, 21 nt, Artificial Seqence
  Synthetic siRNA antisense strand against b2GPI
aacugaucguguugggauauu

SEQ ID NO: 1542 - RNA, 21 nt, Artificial Seqence
  Synthetic siRNA antisense strand against b2GPI
aaacugaucguguugggauau

SEQ ID NO: 1543 - RNA, 21 nt, Artificial Seqence
  Synthetic siRNA antisense strand against b2GPI
aaaacugaucguguugggaua

SEQ ID NO: 1544 - RNA, 21 nt, Artificial Seqence
  Synthetic siRNA antisense strand against b2GPI
aaaaacugaucguguugggau

SEQ ID NO: 1545 - RNA, 21 nt, Artificial Seqence
  Synthetic siRNA antisense strand against b2GPI
gaaaaacugaucguguuggga

SEQ ID NO: 1546 - RNA, 21 nt, Artificial Seqence
  Synthetic siRNA antisense strand against b2GPI
agaaaaacugaucguguuggg

SEQ ID NO: 1547 - RNA, 21 nt, Artificial Seqence
  Synthetic siRNA antisense strand against b2GPI
aagaaaaacugaucguguugg

SEQ ID NO: 1548 - RNA, 21 nt, Artificial Seqence
  Synthetic siRNA antisense strand against b2GPI
caagaaaaacugaucguguug

SEQ ID NO: 1549 - RNA, 21 nt, Artificial Seqence
  Synthetic siRNA antisense strand against b2GPI
acaagaaaaacugaucguguu

SEQ ID NO: 1550 - RNA, 21 nt, Artificial Seqence
  Synthetic siRNA antisense strand against b2GPI
uacaagaaaaacugaucgugu

SEQ ID NO: 1551 - RNA, 21 nt, Artificial Seqence
  Synthetic siRNA antisense strand against b2GPI
uuacaagaaaaacugaucgug

SEQ ID NO: 1552 - RNA, 21 nt, Artificial Seqence
  Synthetic siRNA antisense strand against b2GPI
guuacaagaaaaacugaucgu

SEQ ID NO: 1553 - RNA, 21 nt, Artificial Seqence
  Synthetic siRNA antisense strand against b2GPI
uguuacaagaaaaacugaucg

SEQ ID NO: 1554 - RNA, 21 nt, Artificial Seqence
  Synthetic siRNA antisense strand against b2GPI
guguuacaagaaaaacugauc

SEQ ID NO: 1555 - RNA, 21 nt, Artificial Seqence
  Synthetic siRNA antisense strand against b2GPI
aguguuacaagaaaaacugau

SEQ ID NO: 1556 - RNA, 21 nt, Artificial Seqence
  Synthetic siRNA antisense strand against b2GPI
caguguuacaagaaaaacuga

SEQ ID NO: 1557 - RNA, 21 nt, Artificial Seqence
  Synthetic siRNA antisense strand against b2GPI
ccaguguuacaagaaaaacug

SEQ ID NO: 1558 - RNA, 21 nt, Artificial Seqence
  Synthetic siRNA antisense strand against b2GPI
cccaguguuacaagaaaaacu

SEQ ID NO: 1559 - RNA, 21 nt, Artificial Seqence
  Synthetic siRNA antisense strand against b2GPI
acccaguguuacaagaaaaac

SEQ ID NO: 1560 - RNA, 21 nt, Artificial Seqence
  Synthetic siRNA antisense strand against b2GPI
aacccaguguuacaagaaaaa

SEQ ID NO: 1561 - RNA, 21 nt, Artificial Seqence
  Synthetic siRNA antisense strand against b2GPI
aaacccaguguuacaagaaaa

SEQ ID NO: 1562 - RNA, 21 nt, Artificial Seqence
  Synthetic siRNA antisense strand against b2GPI
aaaacccaguguuacaagaaa

SEQ ID NO: 1563 - RNA, 21 nt, Artificial Seqence
  Synthetic siRNA antisense strand against b2GPI
uaaaacccaguguuacaagaa

SEQ ID NO: 1564 - RNA, 21 nt, Artificial Seqence
  Synthetic siRNA antisense strand against b2GPI
auaaaacccaguguuacaaga

SEQ ID NO: 1565 - RNA, 21 nt, Artificial Seqence
  Synthetic siRNA antisense strand against b2GPI
gauaaaacccaguguuacaag

SEQ ID NO: 1566 - RNA, 21 nt, Artificial Seqence
  Synthetic siRNA antisense strand against b2GPI
agauaaaacccaguguuacaa

SEQ ID NO: 1567 - RNA, 21 nt, Artificial Seqence
  Synthetic siRNA antisense strand against b2GPI
cagauaaaacccaguguuaca

SEQ ID NO: 1568 - RNA, 21 nt, Artificial Seqence
  Synthetic siRNA antisense strand against b2GPI
ucagauaaaacccaguguuac

SEQ ID NO: 1569 - RNA, 21 nt, Artificial Seqence
  Synthetic siRNA antisense strand against b2GPI
uucagauaaaacccaguguua

SEQ ID NO: 1570 - RNA, 21 nt, Artificial Seqence
  Synthetic siRNA antisense strand against b2GPI
auucagauaaaacccaguguu

SEQ ID NO: 1571 - RNA, 21 nt, Artificial Seqence
  Synthetic siRNA antisense strand against b2GPI
cauucagauaaaacccagugu

SEQ ID NO: 1572 - RNA, 21 nt, Artificial Seqence
  Synthetic siRNA antisense strand against b2GPI
ccauucagauaaaacccagug

SEQ ID NO: 1573 - RNA, 21 nt, Artificial Seqence
  Synthetic siRNA antisense strand against b2GPI
gccauucagauaaaacccagu

SEQ ID NO: 1574 - RNA, 21 nt, Artificial Seqence
  Synthetic siRNA antisense strand against b2GPI
cgccauucagauaaaacccag

SEQ ID NO: 1575 - RNA, 21 nt, Artificial Seqence
  Synthetic siRNA antisense strand against b2GPI
gcgccauucagauaaaaccca

SEQ ID NO: 1576 - RNA, 21 nt, Artificial Seqence
  Synthetic siRNA antisense strand against b2GPI
agcgccauucagauaaaaccc

SEQ ID NO: 1577 - RNA, 21 nt, Artificial Seqence
  Synthetic siRNA antisense strand against b2GPI
cagcgccauucagauaaaacc

SEQ ID NO: 1578 - RNA, 21 nt, Artificial Seqence
  Synthetic siRNA antisense strand against b2GPI
ucagcgccauucagauaaaac

SEQ ID NO: 1579 - RNA, 21 nt, Artificial Seqence
  Synthetic siRNA antisense strand against b2GPI
aucagcgccauucagauaaaa

SEQ ID NO: 1580 - RNA, 21 nt, Artificial Seqence
  Synthetic siRNA antisense strand against b2GPI
aaucagcgccauucagauaaa

SEQ ID NO: 1581 - RNA, 21 nt, Artificial Seqence
  Synthetic siRNA antisense strand against b2GPI
gaaucagcgccauucagauaa

SEQ ID NO: 1582 - RNA, 21 nt, Artificial Seqence
  Synthetic siRNA antisense strand against b2GPI
agaaucagcgccauucagaua

SEQ ID NO: 1583 - RNA, 21 nt, Artificial Seqence
  Synthetic siRNA antisense strand against b2GPI
cagaaucagcgccauucagau

SEQ ID NO: 1584 - RNA, 21 nt, Artificial Seqence
  Synthetic siRNA antisense strand against b2GPI
gcagaaucagcgccauucaga

SEQ ID NO: 1585 - RNA, 21 nt, Artificial Seqence
  Synthetic siRNA antisense strand against b2GPI
ggcagaaucagcgccauucag

SEQ ID NO: 1586 - RNA, 21 nt, Artificial Seqence
  Synthetic siRNA antisense strand against b2GPI
uggcagaaucagcgccauuca

SEQ ID NO: 1587 - RNA, 21 nt, Artificial Seqence
  Synthetic siRNA antisense strand against b2GPI
uuggcagaaucagcgccauuc

SEQ ID NO: 1588 - RNA, 21 nt, Artificial Seqence
  Synthetic siRNA antisense strand against b2GPI
cuuggcagaaucagcgccauu

SEQ ID NO: 1589 - RNA, 21 nt, Artificial Seqence
  Synthetic siRNA antisense strand against b2GPI
acuuggcagaaucagcgccau

SEQ ID NO: 1590 - RNA, 21 nt, Artificial Seqence
  Synthetic siRNA antisense strand against b2GPI
cacuuggcagaaucagcgcca

SEQ ID NO: 1591 - RNA, 21 nt, Artificial Seqence
  Synthetic siRNA antisense strand against b2GPI
gcacuuggcagaaucagcgcc

SEQ ID NO: 1592 - RNA, 21 nt, Artificial Seqence
  Synthetic siRNA antisense strand against b2GPI
ugcacuuggcagaaucagcgc

SEQ ID NO: 1593 - RNA, 21 nt, Artificial Seqence
  Synthetic siRNA antisense strand against b2GPI
gugcacuuggcagaaucagcg

SEQ ID NO: 1594 - RNA, 21 nt, Artificial Seqence
  Synthetic siRNA antisense strand against b2GPI
agugcacuuggcagaaucagc

SEQ ID NO: 1595 - RNA, 21 nt, Artificial Seqence
  Synthetic siRNA antisense strand against b2GPI
cagugcacuuggcagaaucag

SEQ ID NO: 1596 - RNA, 21 nt, Artificial Seqence
  Synthetic siRNA antisense strand against b2GPI
ucagugcacuuggcagaauca

SEQ ID NO: 1597 - RNA, 21 nt, Artificial Seqence
  Synthetic siRNA antisense strand against b2GPI
cucagugcacuuggcagaauc

SEQ ID NO: 1598 - RNA, 21 nt, Artificial Seqence
  Synthetic siRNA antisense strand against b2GPI
ccucagugcacuuggcagaau

SEQ ID NO: 1599 - RNA, 21 nt, Artificial Seqence
  Synthetic siRNA antisense strand against b2GPI
uccucagugcacuuggcagaa

SEQ ID NO: 1600 - RNA, 21 nt, Artificial Seqence
  Synthetic siRNA antisense strand against b2GPI
uuccucagugcacuuggcaga

SEQ ID NO: 1601 - RNA, 21 nt, Artificial Seqence
  Synthetic siRNA antisense strand against b2GPI
cuuccucagugcacuuggcag

SEQ ID NO: 1602 - RNA, 21 nt, Artificial Seqence
  Synthetic siRNA antisense strand against b2GPI
ccuuccucagugcacuuggca

SEQ ID NO: 1603 - RNA, 21 nt, Artificial Seqence
  Synthetic siRNA antisense strand against b2GPI
uccuuccucagugcacuuggc

SEQ ID NO: 1604 - RNA, 21 nt, Artificial Seqence
  Synthetic siRNA antisense strand against b2GPI
uuccuuccucagugcacuugg

SEQ ID NO: 1605 - RNA, 21 nt, Artificial Seqence
  Synthetic siRNA antisense strand against b2GPI
uuuccuuccucagugcacuug

SEQ ID NO: 1606 - RNA, 21 nt, Artificial Seqence
  Synthetic siRNA antisense strand against b2GPI
uuuuccuuccucagugcacuu

SEQ ID NO: 1607 - RNA, 21 nt, Artificial Seqence
  Synthetic siRNA antisense strand against b2GPI
auuuuccuuccucagugcacu

SEQ ID NO: 1608 - RNA, 21 nt, Artificial Seqence
  Synthetic siRNA antisense strand against b2GPI
cauuuuccuuccucagugcac

SEQ ID NO: 1609 - RNA, 21 nt, Artificial Seqence
  Synthetic siRNA antisense strand against b2GPI
ccauuuuccuuccucagugca

SEQ ID NO: 1610 - RNA, 21 nt, Artificial Seqence
  Synthetic siRNA antisense strand against b2GPI
uccauuuuccuuccucagugc

SEQ ID NO: 1611 - RNA, 21 nt, Artificial Seqence
  Synthetic siRNA antisense strand against b2GPI
cuccauuuuccuuccucagug

SEQ ID NO: 1612 - RNA, 21 nt, Artificial Seqence
  Synthetic siRNA antisense strand against b2GPI
gcuccauuuuccuuccucagu

SEQ ID NO: 1613 - RNA, 21 nt, Artificial Seqence
  Synthetic siRNA antisense strand against b2GPI
ggcuccauuuuccuuccucag

SEQ ID NO: 1614 - RNA, 21 nt, Artificial Seqence
  Synthetic siRNA antisense strand against b2GPI
gggcuccauuuuccuuccuca

SEQ ID NO: 1615 - RNA, 21 nt, Artificial Seqence
  Synthetic siRNA antisense strand against b2GPI
cgggcuccauuuuccuuccuc

SEQ ID NO: 1616 - RNA, 21 nt, Artificial Seqence
  Synthetic siRNA antisense strand against b2GPI
ccgggcuccauuuuccuuccu

SEQ ID NO: 1617 - RNA, 21 nt, Artificial Seqence
  Synthetic siRNA antisense strand against b2GPI
uccgggcuccauuuuccuucc

SEQ ID NO: 1618 - RNA, 21 nt, Artificial Seqence
  Synthetic siRNA antisense strand against b2GPI
cuccgggcuccauuuuccuuc

SEQ ID NO: 1619 - RNA, 21 nt, Artificial Seqence
  Synthetic siRNA antisense strand against b2GPI
gcuccgggcuccauuuuccuu

SEQ ID NO: 1620 - RNA, 21 nt, Artificial Seqence
  Synthetic siRNA antisense strand against b2GPI
agcuccgggcuccauuuuccu

SEQ ID NO: 1621 - RNA, 21 nt, Artificial Seqence
  Synthetic siRNA antisense strand against b2GPI
aagcuccgggcuccauuuucc

SEQ ID NO: 1622 - RNA, 21 nt, Artificial Seqence
  Synthetic siRNA antisense strand against b2GPI
gaagcuccgggcuccauuuuc

SEQ ID NO: 1623 - RNA, 21 nt, Artificial Seqence
  Synthetic siRNA antisense strand against b2GPI
ggaagcuccgggcuccauuuu

SEQ ID NO: 1624 - RNA, 21 nt, Artificial Seqence
  Synthetic siRNA antisense strand against b2GPI
aggaagcuccgggcuccauuu

SEQ ID NO: 1625 - RNA, 21 nt, Artificial Seqence
  Synthetic siRNA antisense strand against b2GPI
caggaagcuccgggcuccauu

SEQ ID NO: 1626 - RNA, 21 nt, Artificial Seqence
  Synthetic siRNA antisense strand against b2GPI
acaggaagcuccgggcuccau

SEQ ID NO: 1627 - RNA, 21 nt, Artificial Seqence
  Synthetic siRNA antisense strand against b2GPI
gacaggaagcuccgggcucca

SEQ ID NO: 1628 - RNA, 21 nt, Artificial Seqence
  Synthetic siRNA antisense strand against b2GPI
agacaggaagcuccgggcucc

SEQ ID NO: 1629 - RNA, 21 nt, Artificial Seqence
  Synthetic siRNA antisense strand against b2GPI
cagacaggaagcuccgggcuc

SEQ ID NO: 1630 - RNA, 21 nt, Artificial Seqence
  Synthetic siRNA antisense strand against b2GPI
acagacaggaagcuccgggcu

SEQ ID NO: 1631 - RNA, 21 nt, Artificial Seqence
  Synthetic siRNA antisense strand against b2GPI
cacagacaggaagcuccgggc

SEQ ID NO: 1632 - RNA, 21 nt, Artificial Seqence
  Synthetic siRNA antisense strand against b2GPI
gcacagacaggaagcuccggg

SEQ ID NO: 1633 - RNA, 21 nt, Artificial Seqence
  Synthetic siRNA antisense strand against b2GPI
agcacagacaggaagcuccgg

SEQ ID NO: 1634 - RNA, 21 nt, Artificial Seqence
  Synthetic siRNA antisense strand against b2GPI
gagcacagacaggaagcuccg

SEQ ID NO: 1635 - RNA, 21 nt, Artificial Seqence
  Synthetic siRNA antisense strand against b2GPI
ggagcacagacaggaagcucc

SEQ ID NO: 1636 - RNA, 21 nt, Artificial Seqence
  Synthetic siRNA antisense strand against b2GPI
gggagcacagacaggaagcuc

SEQ ID NO: 1637 - RNA, 21 nt, Artificial Seqence
  Synthetic siRNA antisense strand against b2GPI
ugggagcacagacaggaagcu

SEQ ID NO: 1638 - RNA, 21 nt, Artificial Seqence
  Synthetic siRNA antisense strand against b2GPI
augggagcacagacaggaagc

SEQ ID NO: 1639 - RNA, 21 nt, Artificial Seqence
  Synthetic siRNA antisense strand against b2GPI
gaugggagcacagacaggaag

SEQ ID NO: 1640 - RNA, 21 nt, Artificial Seqence
  Synthetic siRNA antisense strand against b2GPI
ugaugggagcacagacaggaa

SEQ ID NO: 1641 - RNA, 21 nt, Artificial Seqence
  Synthetic siRNA antisense strand against b2GPI
augaugggagcacagacagga

SEQ ID NO: 1642 - RNA, 21 nt, Artificial Seqence
  Synthetic siRNA antisense strand against b2GPI
gaugaugggagcacagacagg

SEQ ID NO: 1643 - RNA, 21 nt, Artificial Seqence
  Synthetic siRNA antisense strand against b2GPI
agaugaugggagcacagacag

SEQ ID NO: 1644 - RNA, 21 nt, Artificial Seqence
  Synthetic siRNA antisense strand against b2GPI
cagaugaugggagcacagaca

SEQ ID NO: 1645 - RNA, 21 nt, Artificial Seqence
  Synthetic siRNA antisense strand against b2GPI
gcagaugaugggagcacagac

SEQ ID NO: 1646 - RNA, 21 nt, Artificial Seqence
  Synthetic siRNA antisense strand against b2GPI
ggcagaugaugggagcacaga

SEQ ID NO: 1647 - RNA, 21 nt, Artificial Seqence
  Synthetic siRNA antisense strand against b2GPI
gggcagaugaugggagcacag

SEQ ID NO: 1648 - RNA, 21 nt, Artificial Seqence
  Synthetic siRNA antisense strand against b2GPI
agggcagaugaugggagcaca

SEQ ID NO: 1649 - RNA, 21 nt, Artificial Seqence
  Synthetic siRNA antisense strand against b2GPI
gagggcagaugaugggagcac

SEQ ID NO: 1650 - RNA, 21 nt, Artificial Seqence
  Synthetic siRNA antisense strand against b2GPI
ggagggcagaugaugggagca

SEQ ID NO: 1651 - RNA, 21 nt, Artificial Seqence
  Synthetic siRNA antisense strand against b2GPI
uggagggcagaugaugggagc

SEQ ID NO: 1652 - RNA, 21 nt, Artificial Seqence
  Synthetic siRNA antisense strand against b2GPI
guggagggcagaugaugggag

SEQ ID NO: 1653 - RNA, 21 nt, Artificial Seqence
  Synthetic siRNA antisense strand against b2GPI
gguggagggcagaugauggga

SEQ ID NO: 1654 - RNA, 21 nt, Artificial Seqence
  Synthetic siRNA antisense strand against b2GPI
ugguggagggcagaugauggg

SEQ ID NO: 1655 - RNA, 21 nt, Artificial Seqence
  Synthetic siRNA antisense strand against b2GPI
augguggagggcagaugaugg

SEQ ID NO: 1656 - RNA, 21 nt, Artificial Seqence
  Synthetic siRNA antisense strand against b2GPI
gaugguggagggcagaugaug

SEQ ID NO: 1657 - RNA, 21 nt, Artificial Seqence
  Synthetic siRNA antisense strand against b2GPI
ggaugguggagggcagaugau

SEQ ID NO: 1658 - RNA, 21 nt, Artificial Seqence
  Synthetic siRNA antisense strand against b2GPI
uggaugguggagggcagauga

SEQ ID NO: 1659 - RNA, 21 nt, Artificial Seqence
  Synthetic siRNA antisense strand against b2GPI
auggaugguggagggcagaug

SEQ ID NO: 1660 - RNA, 21 nt, Artificial Seqence
  Synthetic siRNA antisense strand against b2GPI
uauggaugguggagggcagau

SEQ ID NO: 1661 - RNA, 21 nt, Artificial Seqence
  Synthetic siRNA antisense strand against b2GPI
guauggaugguggagggcaga

SEQ ID NO: 1662 - RNA, 21 nt, Artificial Seqence
  Synthetic siRNA antisense strand against b2GPI
gguauggaugguggagggcag

SEQ ID NO: 1663 - RNA, 21 nt, Artificial Seqence
  Synthetic siRNA antisense strand against b2GPI
agguauggaugguggagggca

SEQ ID NO: 1664 - RNA, 21 nt, Artificial Seqence
  Synthetic siRNA antisense strand against b2GPI
uagguauggaugguggagggc

SEQ ID NO: 1665 - RNA, 21 nt, Artificial Seqence
  Synthetic siRNA antisense strand against b2GPI
guagguauggaugguggaggg

SEQ ID NO: 1666 - RNA, 21 nt, Artificial Seqence
  Synthetic siRNA antisense strand against b2GPI
cguagguauggaugguggagg

SEQ ID NO: 1667 - RNA, 21 nt, Artificial Seqence
  Synthetic siRNA antisense strand against b2GPI
acguagguauggaugguggag

SEQ ID NO: 1668 - RNA, 21 nt, Artificial Seqence
  Synthetic siRNA antisense strand against b2GPI
aacguagguauggauggugga

SEQ ID NO: 1669 - RNA, 21 nt, Artificial Seqence
  Synthetic siRNA antisense strand against b2GPI
aaacguagguauggauggugg

SEQ ID NO: 1670 - RNA, 21 nt, Artificial Seqence
  Synthetic siRNA antisense strand against b2GPI
caaacguagguauggauggug

SEQ ID NO: 1671 - RNA, 21 nt, Artificial Seqence
  Synthetic siRNA antisense strand against b2GPI
gcaaacguagguauggauggu

SEQ ID NO: 1672 - RNA, 21 nt, Artificial Seqence
  Synthetic siRNA antisense strand against b2GPI
ugcaaacguagguauggaugg

SEQ ID NO: 1673 - RNA, 21 nt, Artificial Seqence
  Synthetic siRNA antisense strand against b2GPI
uugcaaacguagguauggaug

SEQ ID NO: 1674 - RNA, 21 nt, Artificial Seqence
  Synthetic siRNA antisense strand against b2GPI
guugcaaacguagguauggau

SEQ ID NO: 1675 - RNA, 21 nt, Artificial Seqence
  Synthetic siRNA antisense strand against b2GPI
uguugcaaacguagguaugga

SEQ ID NO: 1676 - RNA, 21 nt, Artificial Seqence
  Synthetic siRNA antisense strand against b2GPI
guguugcaaacguagguaugg

SEQ ID NO: 1677 - RNA, 21 nt, Artificial Seqence
  Synthetic siRNA antisense strand against b2GPI
aguguugcaaacguagguaug

SEQ ID NO: 1678 - RNA, 21 nt, Artificial Seqence
  Synthetic siRNA antisense strand against b2GPI
aaguguugcaaacguagguau

SEQ ID NO: 1679 - RNA, 21 nt, Artificial Seqence
  Synthetic siRNA antisense strand against b2GPI
gaaguguugcaaacguaggua

SEQ ID NO: 1680 - RNA, 21 nt, Artificial Seqence
  Synthetic siRNA antisense strand against b2GPI
cgaaguguugcaaacguaggu

SEQ ID NO: 1681 - RNA, 21 nt, Artificial Seqence
  Synthetic siRNA antisense strand against b2GPI
acgaaguguugcaaacguagg

SEQ ID NO: 1682 - RNA, 21 nt, Artificial Seqence
  Synthetic siRNA antisense strand against b2GPI
cacgaaguguugcaaacguag

SEQ ID NO: 1683 - RNA, 21 nt, Artificial Seqence
  Synthetic siRNA antisense strand against b2GPI
acacgaaguguugcaaacgua

SEQ ID NO: 1684 - RNA, 21 nt, Artificial Seqence
  Synthetic siRNA antisense strand against b2GPI
aacacgaaguguugcaaacgu

SEQ ID NO: 1685 - RNA, 21 nt, Artificial Seqence
  Synthetic siRNA antisense strand against b2GPI
aaacacgaaguguugcaaacg

SEQ ID NO: 1686 - RNA, 21 nt, Artificial Seqence
  Synthetic siRNA antisense strand against b2GPI
uaaacacgaaguguugcaaac

SEQ ID NO: 1687 - RNA, 21 nt, Artificial Seqence
  Synthetic siRNA antisense strand against b2GPI
auaaacacgaaguguugcaaa

SEQ ID NO: 1688 - RNA, 21 nt, Artificial Seqence
  Synthetic siRNA antisense strand against b2GPI
uauaaacacgaaguguugcaa

SEQ ID NO: 1689 - RNA, 21 nt, Artificial Seqence
  Synthetic siRNA antisense strand against b2GPI
uuauaaacacgaaguguugca

SEQ ID NO: 1690 - RNA, 21 nt, Artificial Seqence
  Synthetic siRNA antisense strand against b2GPI
cuuauaaacacgaaguguugc

SEQ ID NO: 1691 - RNA, 21 nt, Artificial Seqence
  Synthetic siRNA antisense strand against b2GPI
gcuuauaaacacgaaguguug

SEQ ID NO: 1692 - RNA, 21 nt, Artificial Seqence
  Synthetic siRNA antisense strand against b2GPI
ggcuuauaaacacgaaguguu

SEQ ID NO: 1693 - RNA, 21 nt, Artificial Seqence
  Synthetic siRNA antisense strand against b2GPI
uggcuuauaaacacgaagugu

SEQ ID NO: 1694 - RNA, 21 nt, Artificial Seqence
  Synthetic siRNA antisense strand against b2GPI
auggcuuauaaacacgaagug

SEQ ID NO: 1695 - RNA, 21 nt, Artificial Seqence
  Synthetic siRNA antisense strand against b2GPI
gauggcuuauaaacacgaagu

SEQ ID NO: 1696 - RNA, 21 nt, Artificial Seqence
  Synthetic siRNA antisense strand against b2GPI
ugauggcuuauaaacacgaag

SEQ ID NO: 1697 - RNA, 21 nt, Artificial Seqence
  Synthetic siRNA antisense strand against b2GPI
cugauggcuuauaaacacgaa

SEQ ID NO: 1698 - RNA, 21 nt, Artificial Seqence
  Synthetic siRNA antisense strand against b2GPI
gcugauggcuuauaaacacga

SEQ ID NO: 1699 - RNA, 21 nt, Artificial Seqence
  Synthetic siRNA antisense strand against b2GPI
agcugauggcuuauaaacacg

SEQ ID NO: 1700 - RNA, 21 nt, Artificial Seqence
  Synthetic siRNA antisense strand against b2GPI
cagcugauggcuuauaaacac

SEQ ID NO: 1701 - RNA, 21 nt, Artificial Seqence
  Synthetic siRNA antisense strand against b2GPI
ccagcugauggcuuauaaaca

SEQ ID NO: 1702 - RNA, 21 nt, Artificial Seqence
  Synthetic siRNA antisense strand against b2GPI
uccagcugauggcuuauaaac

SEQ ID NO: 1703 - RNA, 21 nt, Artificial Seqence
  Synthetic siRNA antisense strand against b2GPI
uuccagcugauggcuuauaaa

SEQ ID NO: 1704 - RNA, 21 nt, Artificial Seqence
  Synthetic siRNA antisense strand against b2GPI
uuuccagcugauggcuuauaa

SEQ ID NO: 1705 - RNA, 21 nt, Artificial Seqence
  Synthetic siRNA antisense strand against b2GPI
guuuccagcugauggcuuaua

SEQ ID NO: 1706 - RNA, 21 nt, Artificial Seqence
  Synthetic siRNA antisense strand against b2GPI
uguuuccagcugauggcuuau

SEQ ID NO: 1707 - RNA, 21 nt, Artificial Seqence
  Synthetic siRNA antisense strand against b2GPI
uuguuuccagcugauggcuua

SEQ ID NO: 1708 - RNA, 21 nt, Artificial Seqence
  Synthetic siRNA antisense strand against b2GPI
auuguuuccagcugauggcuu

SEQ ID NO: 1709 - RNA, 21 nt, Artificial Seqence
  Synthetic siRNA antisense strand against b2GPI
aauuguuuccagcugauggcu

SEQ ID NO: 1710 - RNA, 21 nt, Artificial Seqence
  Synthetic siRNA antisense strand against b2GPI
gaauuguuuccagcugauggc

SEQ ID NO: 1711 - RNA, 21 nt, Artificial Seqence
  Synthetic siRNA antisense strand against b2GPI
ggaauuguuuccagcugaugg

SEQ ID NO: 1712 - RNA, 21 nt, Artificial Seqence
  Synthetic siRNA antisense strand against b2GPI
gggaauuguuuccagcugaug

SEQ ID NO: 1713 - RNA, 21 nt, Artificial Seqence
  Synthetic siRNA antisense strand against b2GPI
agggaauuguuuccagcugau

SEQ ID NO: 1714 - RNA, 21 nt, Artificial Seqence
  Synthetic siRNA antisense strand against b2GPI
gagggaauuguuuccagcuga

SEQ ID NO: 1715 - RNA, 21 nt, Artificial Seqence
  Synthetic siRNA antisense strand against b2GPI
agagggaauuguuuccagcug

SEQ ID NO: 1716 - RNA, 21 nt, Artificial Seqence
  Synthetic siRNA antisense strand against b2GPI
uagagggaauuguuuccagcu

SEQ ID NO: 1717 - RNA, 21 nt, Artificial Seqence
  Synthetic siRNA antisense strand against b2GPI
auagagggaauuguuuccagc

SEQ ID NO: 1718 - RNA, 21 nt, Artificial Seqence
  Synthetic siRNA antisense strand against b2GPI
gauagagggaauuguuuccag

SEQ ID NO: 1719 - RNA, 21 nt, Artificial Seqence
  Synthetic siRNA antisense strand against b2GPI
cgauagagggaauuguuucca

SEQ ID NO: 1720 - RNA, 21 nt, Artificial Seqence
  Synthetic siRNA antisense strand against b2GPI
ccgauagagggaauuguuucc

SEQ ID NO: 1721 - RNA, 21 nt, Artificial Seqence
  Synthetic siRNA antisense strand against b2GPI
cccgauagagggaauuguuuc

SEQ ID NO: 1722 - RNA, 21 nt, Artificial Seqence
  Synthetic siRNA antisense strand against b2GPI
ucccgauagagggaauuguuu

SEQ ID NO: 1723 - RNA, 21 nt, Artificial Seqence
  Synthetic siRNA antisense strand against b2GPI
gucccgauagagggaauuguu

SEQ ID NO: 1724 - RNA, 21 nt, Artificial Seqence
  Synthetic siRNA antisense strand against b2GPI
ugucccgauagagggaauugu

SEQ ID NO: 1725 - RNA, 21 nt, Artificial Seqence
  Synthetic siRNA antisense strand against b2GPI
gugucccgauagagggaauug

SEQ ID NO: 1726 - RNA, 21 nt, Artificial Seqence
  Synthetic siRNA antisense strand against b2GPI
ugugucccgauagagggaauu

SEQ ID NO: 1727 - RNA, 21 nt, Artificial Seqence
  Synthetic siRNA antisense strand against b2GPI
cugugucccgauagagggaau

SEQ ID NO: 1728 - RNA, 21 nt, Artificial Seqence
  Synthetic siRNA antisense strand against b2GPI
gcugugucccgauagagggaa

SEQ ID NO: 1729 - RNA, 21 nt, Artificial Seqence
  Synthetic siRNA antisense strand against b2GPI
ugcugugucccgauagaggga

SEQ ID NO: 1730 - RNA, 21 nt, Artificial Seqence
  Synthetic siRNA antisense strand against b2GPI
cugcugugucccgauagaggg

SEQ ID NO: 1731 - RNA, 21 nt, Artificial Seqence
  Synthetic siRNA antisense strand against b2GPI
acugcugugucccgauagagg

SEQ ID NO: 1732 - RNA, 21 nt, Artificial Seqence
  Synthetic siRNA antisense strand against b2GPI
aacugcugugucccgauagag

SEQ ID NO: 1733 - RNA, 21 nt, Artificial Seqence
  Synthetic siRNA antisense strand against b2GPI
aaacugcugugucccgauaga

SEQ ID NO: 1734 - RNA, 21 nt, Artificial Seqence
  Synthetic siRNA antisense strand against b2GPI
aaaacugcugugucccgauag

SEQ ID NO: 1735 - RNA, 21 nt, Artificial Seqence
  Synthetic siRNA antisense strand against b2GPI
aaaaacugcugugucccgaua

SEQ ID NO: 1736 - RNA, 21 nt, Artificial Seqence
  Synthetic siRNA antisense strand against b2GPI
caaaaacugcugugucccgau

SEQ ID NO: 1737 - RNA, 21 nt, Artificial Seqence
  Synthetic siRNA antisense strand against b2GPI
ucaaaaacugcugugucccga

SEQ ID NO: 1738 - RNA, 21 nt, Artificial Seqence
  Synthetic siRNA antisense strand against b2GPI
uucaaaaacugcugugucccg

SEQ ID NO: 1739 - RNA, 21 nt, Artificial Seqence
  Synthetic siRNA antisense strand against b2GPI
auucaaaaacugcuguguccc

SEQ ID NO: 1740 - RNA, 21 nt, Artificial Seqence
  Synthetic siRNA antisense strand against b2GPI
cauucaaaaacugcugugucc

SEQ ID NO: 1741 - RNA, 21 nt, Artificial Seqence
  Synthetic siRNA antisense strand against b2GPI
acauucaaaaacugcuguguc

SEQ ID NO: 1742 - RNA, 21 nt, Artificial Seqence
  Synthetic siRNA antisense strand against b2GPI
aacauucaaaaacugcugugu

SEQ ID NO: 1743 - RNA, 21 nt, Artificial Seqence
  Synthetic siRNA antisense strand against b2GPI
aaacauucaaaaacugcugug

SEQ ID NO: 1744 - RNA, 21 nt, Artificial Seqence
  Synthetic siRNA antisense strand against b2GPI
caaacauucaaaaacugcugu

SEQ ID NO: 1745 - RNA, 21 nt, Artificial Seqence
  Synthetic siRNA antisense strand against b2GPI
gcaaacauucaaaaacugcug

SEQ ID NO: 1746 - RNA, 21 nt, Artificial Seqence
  Synthetic siRNA antisense strand against b2GPI
ggcaaacauucaaaaacugcu

SEQ ID NO: 1747 - RNA, 21 nt, Artificial Seqence
  Synthetic siRNA antisense strand against b2GPI
uggcaaacauucaaaaacugc

SEQ ID NO: 1748 - RNA, 21 nt, Artificial Seqence
  Synthetic siRNA antisense strand against b2GPI
guggcaaacauucaaaaacug

SEQ ID NO: 1749 - RNA, 21 nt, Artificial Seqence
  Synthetic siRNA antisense strand against b2GPI
uguggcaaacauucaaaaacu

SEQ ID NO: 1750 - RNA, 21 nt, Artificial Seqence
  Synthetic siRNA antisense strand against b2GPI
uuguggcaaacauucaaaaac

SEQ ID NO: 1751 - RNA, 21 nt, Artificial Seqence
  Synthetic siRNA antisense strand against b2GPI
guuguggcaaacauucaaaaa

SEQ ID NO: 1752 - RNA, 21 nt, Artificial Seqence
  Synthetic siRNA antisense strand against b2GPI
uguuguggcaaacauucaaaa

SEQ ID NO: 1753 - RNA, 21 nt, Artificial Seqence
  Synthetic siRNA antisense strand against b2GPI
auguuguggcaaacauucaaa

SEQ ID NO: 1754 - RNA, 21 nt, Artificial Seqence
  Synthetic siRNA antisense strand against b2GPI
cauguuguggcaaacauucaa

SEQ ID NO: 1755 - RNA, 21 nt, Artificial Seqence
  Synthetic siRNA antisense strand against b2GPI
gcauguuguggcaaacauuca

SEQ ID NO: 1756 - RNA, 21 nt, Artificial Seqence
  Synthetic siRNA antisense strand against b2GPI
cgcauguuguggcaaacauuc

SEQ ID NO: 1757 - RNA, 21 nt, Artificial Seqence
  Synthetic siRNA antisense strand against b2GPI
ucgcauguuguggcaaacauu

SEQ ID NO: 1758 - RNA, 21 nt, Artificial Seqence
  Synthetic siRNA antisense strand against b2GPI
aucgcauguuguggcaaacau

SEQ ID NO: 1759 - RNA, 21 nt, Artificial Seqence
  Synthetic siRNA antisense strand against b2GPI
caucgcauguuguggcaaaca

SEQ ID NO: 1760 - RNA, 21 nt, Artificial Seqence
  Synthetic siRNA antisense strand against b2GPI
acaucgcauguuguggcaaac

SEQ ID NO: 1761 - RNA, 21 nt, Artificial Seqence
  Synthetic siRNA antisense strand against b2GPI
aacaucgcauguuguggcaaa

SEQ ID NO: 1762 - RNA, 21 nt, Artificial Seqence
  Synthetic siRNA antisense strand against b2GPI
aaacaucgcauguuguggcaa

SEQ ID NO: 1763 - RNA, 21 nt, Artificial Seqence
  Synthetic siRNA antisense strand against b2GPI
caaacaucgcauguuguggca

SEQ ID NO: 1764 - RNA, 21 nt, Artificial Seqence
  Synthetic siRNA antisense strand against b2GPI
ccaaacaucgcauguuguggc

SEQ ID NO: 1765 - RNA, 21 nt, Artificial Seqence
  Synthetic siRNA antisense strand against b2GPI
uccaaacaucgcauguugugg

SEQ ID NO: 1766 - RNA, 21 nt, Artificial Seqence
  Synthetic siRNA antisense strand against b2GPI
uuccaaacaucgcauguugug

SEQ ID NO: 1767 - RNA, 21 nt, Artificial Seqence
  Synthetic siRNA antisense strand against b2GPI
uuuccaaacaucgcauguugu

SEQ ID NO: 1768 - RNA, 21 nt, Artificial Seqence
  Synthetic siRNA antisense strand against b2GPI
auuuccaaacaucgcauguug

SEQ ID NO: 1769 - RNA, 21 nt, Artificial Seqence
  Synthetic siRNA antisense strand against b2GPI
cauuuccaaacaucgcauguu

SEQ ID NO: 1770 - RNA, 21 nt, Artificial Seqence
  Synthetic siRNA antisense strand against b2GPI
ucauuuccaaacaucgcaugu

SEQ ID NO: 1771 - RNA, 21 nt, Artificial Seqence
  Synthetic siRNA antisense strand against b2GPI
aucauuuccaaacaucgcaug

SEQ ID NO: 1772 - RNA, 21 nt, Artificial Seqence
  Synthetic siRNA antisense strand against b2GPI
uaucauuuccaaacaucgcau

SEQ ID NO: 1773 - RNA, 21 nt, Artificial Seqence
  Synthetic siRNA antisense strand against b2GPI
guaucauuuccaaacaucgca

SEQ ID NO: 1774 - RNA, 21 nt, Artificial Seqence
  Synthetic siRNA antisense strand against b2GPI
uguaucauuuccaaacaucgc

SEQ ID NO: 1775 - RNA, 21 nt, Artificial Seqence
  Synthetic siRNA antisense strand against b2GPI
uuguaucauuuccaaacaucg

SEQ ID NO: 1776 - RNA, 21 nt, Artificial Seqence
  Synthetic siRNA antisense strand against b2GPI
auuguaucauuuccaaacauc

SEQ ID NO: 1777 - RNA, 21 nt, Artificial Seqence
  Synthetic siRNA antisense strand against b2GPI
aauuguaucauuuccaaacau

SEQ ID NO: 1778 - RNA, 21 nt, Artificial Seqence
  Synthetic siRNA antisense strand against b2GPI
uaauuguaucauuuccaaaca

SEQ ID NO: 1779 - RNA, 21 nt, Artificial Seqence
  Synthetic siRNA antisense strand against b2GPI
guaauuguaucauuuccaaac

SEQ ID NO: 1780 - RNA, 21 nt, Artificial Seqence
  Synthetic siRNA antisense strand against b2GPI
gguaauuguaucauuuccaaa

SEQ ID NO: 1781 - RNA, 21 nt, Artificial Seqence
  Synthetic siRNA antisense strand against b2GPI
agguaauuguaucauuuccaa

SEQ ID NO: 1782 - RNA, 21 nt, Artificial Seqence
  Synthetic siRNA antisense strand against b2GPI
cagguaauuguaucauuucca

SEQ ID NO: 1783 - RNA, 21 nt, Artificial Seqence
  Synthetic siRNA antisense strand against b2GPI
gcagguaauuguaucauuucc

SEQ ID NO: 1784 - RNA, 21 nt, Artificial Seqence
  Synthetic siRNA antisense strand against b2GPI
ugcagguaauuguaucauuuc

SEQ ID NO: 1785 - RNA, 21 nt, Artificial Seqence
  Synthetic siRNA antisense strand against b2GPI
gugcagguaauuguaucauuu

SEQ ID NO: 1786 - RNA, 21 nt, Artificial Seqence
  Synthetic siRNA antisense strand against b2GPI
cgugcagguaauuguaucauu

SEQ ID NO: 1787 - RNA, 21 nt, Artificial Seqence
  Synthetic siRNA antisense strand against b2GPI
ucgugcagguaauuguaucau

SEQ ID NO: 1788 - RNA, 21 nt, Artificial Seqence
  Synthetic siRNA antisense strand against b2GPI
gucgugcagguaauuguauca

SEQ ID NO: 1789 - RNA, 21 nt, Artificial Seqence
  Synthetic siRNA antisense strand against b2GPI
ugucgugcagguaauuguauc

SEQ ID NO: 1790 - RNA, 21 nt, Artificial Seqence
  Synthetic siRNA antisense strand against b2GPI
gugucgugcagguaauuguau

SEQ ID NO: 1791 - RNA, 21 nt, Artificial Seqence
  Synthetic siRNA antisense strand against b2GPI
ugugucgugcagguaauugua

SEQ ID NO: 1792 - RNA, 21 nt, Artificial Seqence
  Synthetic siRNA antisense strand against b2GPI
augugucgugcagguaauugu

SEQ ID NO: 1793 - RNA, 21 nt, Artificial Seqence
  Synthetic siRNA antisense strand against b2GPI
caugugucgugcagguaauug

SEQ ID NO: 1794 - RNA, 21 nt, Artificial Seqence
  Synthetic siRNA antisense strand against b2GPI
ccaugugucgugcagguaauu

SEQ ID NO: 1795 - RNA, 21 nt, Artificial Seqence
  Synthetic siRNA antisense strand against b2GPI
uccaugugucgugcagguaau

SEQ ID NO: 1796 - RNA, 21 nt, Artificial Seqence
  Synthetic siRNA antisense strand against b2GPI
uuccaugugucgugcagguaa

SEQ ID NO: 1797 - RNA, 21 nt, Artificial Seqence
  Synthetic siRNA antisense strand against b2GPI
uuuccaugugucgugcaggua

SEQ ID NO: 1798 - RNA, 21 nt, Artificial Seqence
  Synthetic siRNA antisense strand against b2GPI
auuuccaugugucgugcaggu

SEQ ID NO: 1799 - RNA, 21 nt, Artificial Seqence
  Synthetic siRNA antisense strand against b2GPI
aauuuccaugugucgugcagg

SEQ ID NO: 1800 - RNA, 21 nt, Artificial Seqence
  Synthetic siRNA antisense strand against b2GPI
caauuuccaugugucgugcag

SEQ ID NO: 1801 - RNA, 21 nt, Artificial Seqence
  Synthetic siRNA antisense strand against b2GPI
ccaauuuccaugugucgugca

SEQ ID NO: 1802 - RNA, 21 nt, Artificial Seqence
  Synthetic siRNA antisense strand against b2GPI
uccaauuuccaugugucgugc

SEQ ID NO: 1803 - RNA, 21 nt, Artificial Seqence
  Synthetic siRNA antisense strand against b2GPI
guccaauuuccaugugucgug

SEQ ID NO: 1804 - RNA, 21 nt, Artificial Seqence
  Synthetic siRNA antisense strand against b2GPI
aguccaauuuccaugugucgu

SEQ ID NO: 1805 - RNA, 21 nt, Artificial Seqence
  Synthetic siRNA antisense strand against b2GPI
uaguccaauuuccaugugucg

SEQ ID NO: 1806 - RNA, 21 nt, Artificial Seqence
  Synthetic siRNA antisense strand against b2GPI
uuaguccaauuuccauguguc

SEQ ID NO: 1807 - RNA, 21 nt, Artificial Seqence
  Synthetic siRNA antisense strand against b2GPI
uuuaguccaauuuccaugugu

SEQ ID NO: 1808 - RNA, 21 nt, Artificial Seqence
  Synthetic siRNA antisense strand against b2GPI
auuuaguccaauuuccaugug

SEQ ID NO: 1809 - RNA, 21 nt, Artificial Seqence
  Synthetic siRNA antisense strand against b2GPI
aauuuaguccaauuuccaugu

SEQ ID NO: 1810 - RNA, 21 nt, Artificial Seqence
  Synthetic siRNA antisense strand against b2GPI
uaauuuaguccaauuuccaug

SEQ ID NO: 1811 - RNA, 21 nt, Artificial Seqence
  Synthetic siRNA antisense strand against b2GPI
guaauuuaguccaauuuccau

SEQ ID NO: 1812 - RNA, 21 nt, Artificial Seqence
  Synthetic siRNA antisense strand against b2GPI
gguaauuuaguccaauuucca

SEQ ID NO: 1813 - RNA, 21 nt, Artificial Seqence
  Synthetic siRNA antisense strand against b2GPI
ugguaauuuaguccaauuucc

SEQ ID NO: 1814 - RNA, 21 nt, Artificial Seqence
  Synthetic siRNA antisense strand against b2GPI
cugguaauuuaguccaauuuc

SEQ ID NO: 1815 - RNA, 21 nt, Artificial Seqence
  Synthetic siRNA antisense strand against b2GPI
ucugguaauuuaguccaauuu

SEQ ID NO: 1816 - RNA, 21 nt, Artificial Seqence
  Synthetic siRNA antisense strand against b2GPI
uucugguaauuuaguccaauu

SEQ ID NO: 1817 - RNA, 21 nt, Artificial Seqence
  Synthetic siRNA antisense strand against b2GPI
auucugguaauuuaguccaau

SEQ ID NO: 1818 - RNA, 21 nt, Artificial Seqence
  Synthetic siRNA antisense strand against b2GPI
cauucugguaauuuaguccaa

SEQ ID NO: 1819 - RNA, 21 nt, Artificial Seqence
  Synthetic siRNA antisense strand against b2GPI
gcauucugguaauuuagucca

SEQ ID NO: 1820 - RNA, 21 nt, Artificial Seqence
  Synthetic siRNA antisense strand against b2GPI
ugcauucugguaauuuagucc

SEQ ID NO: 1821 - RNA, 21 nt, Artificial Seqence
  Synthetic siRNA antisense strand against b2GPI
cugcauucugguaauuuaguc

SEQ ID NO: 1822 - RNA, 21 nt, Artificial Seqence
  Synthetic siRNA antisense strand against b2GPI
ccugcauucugguaauuuagu

SEQ ID NO: 1823 - RNA, 21 nt, Artificial Seqence
  Synthetic siRNA antisense strand against b2GPI
cccugcauucugguaauuuag

SEQ ID NO: 1824 - RNA, 21 nt, Artificial Seqence
  Synthetic siRNA antisense strand against b2GPI
ucccugcauucugguaauuua

SEQ ID NO: 1825 - RNA, 21 nt, Artificial Seqence
  Synthetic siRNA antisense strand against b2GPI
uucccugcauucugguaauuu

SEQ ID NO: 1826 - RNA, 21 nt, Artificial Seqence
  Synthetic siRNA antisense strand against b2GPI
cuucccugcauucugguaauu

SEQ ID NO: 1827 - RNA, 21 nt, Artificial Seqence
  Synthetic siRNA antisense strand against b2GPI
acuucccugcauucugguaau

SEQ ID NO: 1828 - RNA, 21 nt, Artificial Seqence
  Synthetic siRNA antisense strand against b2GPI
uacuucccugcauucugguaa

SEQ ID NO: 1829 - RNA, 21 nt, Artificial Seqence
  Synthetic siRNA antisense strand against b2GPI
uuacuucccugcauucuggua

SEQ ID NO: 1830 - RNA, 21 nt, Artificial Seqence
  Synthetic siRNA antisense strand against b2GPI
uuuacuucccugcauucuggu

SEQ ID NO: 1831 - RNA, 21 nt, Artificial Seqence
  Synthetic siRNA antisense strand against b2GPI
uuuuacuucccugcauucugg

SEQ ID NO: 1832 - RNA, 21 nt, Artificial Seqence
  Synthetic siRNA antisense strand against b2GPI
auuuuacuucccugcauucug

SEQ ID NO: 1833 - RNA, 21 nt, Artificial Seqence
  Synthetic siRNA antisense strand against b2GPI
cauuuuacuucccugcauucu

SEQ ID NO: 1834 - RNA, 21 nt, Artificial Seqence
  Synthetic siRNA antisense strand against b2GPI
gcauuuuacuucccugcauuc

SEQ ID NO: 1835 - RNA, 21 nt, Artificial Seqence
  Synthetic siRNA antisense strand against b2GPI
ggcauuuuacuucccugcauu

SEQ ID NO: 1836 - RNA, 21 nt, Artificial Seqence
  Synthetic siRNA antisense strand against b2GPI
gggcauuuuacuucccugcau

SEQ ID NO: 1837 - RNA, 21 nt, Artificial Seqence
  Synthetic siRNA antisense strand against b2GPI
ugggcauuuuacuucccugca

SEQ ID NO: 1838 - RNA, 21 nt, Artificial Seqence
  Synthetic siRNA antisense strand against b2GPI
augggcauuuuacuucccugc

SEQ ID NO: 1839 - RNA, 21 nt, Artificial Seqence
  Synthetic siRNA antisense strand against b2GPI
aaugggcauuuuacuucccug

SEQ ID NO: 1840 - RNA, 21 nt, Artificial Seqence
  Synthetic siRNA antisense strand against b2GPI
gaaugggcauuuuacuucccu

SEQ ID NO: 1841 - RNA, 21 nt, Artificial Seqence
  Synthetic siRNA antisense strand against b2GPI
ggaaugggcauuuuacuuccc

SEQ ID NO: 1842 - RNA, 21 nt, Artificial Seqence
  Synthetic siRNA antisense strand against b2GPI
gggaaugggcauuuuacuucc

SEQ ID NO: 1843 - RNA, 21 nt, Artificial Seqence
  Synthetic siRNA antisense strand against b2GPI
ugggaaugggcauuuuacuuc

SEQ ID NO: 1844 - RNA, 21 nt, Artificial Seqence
  Synthetic siRNA antisense strand against b2GPI
augggaaugggcauuuuacuu

SEQ ID NO: 1845 - RNA, 21 nt, Artificial Seqence
  Synthetic siRNA antisense strand against b2GPI
gaugggaaugggcauuuuacu

SEQ ID NO: 1846 - RNA, 21 nt, Artificial Seqence
  Synthetic siRNA antisense strand against b2GPI
ugaugggaaugggcauuuuac

SEQ ID NO: 1847 - RNA, 21 nt, Artificial Seqence
  Synthetic siRNA antisense strand against b2GPI
uugaugggaaugggcauuuua

SEQ ID NO: 1848 - RNA, 21 nt, Artificial Seqence
  Synthetic siRNA antisense strand against b2GPI
cuugaugggaaugggcauuuu

SEQ ID NO: 1849 - RNA, 21 nt, Artificial Seqence
  Synthetic siRNA antisense strand against b2GPI
ucuugaugggaaugggcauuu

SEQ ID NO: 1850 - RNA, 21 nt, Artificial Seqence
  Synthetic siRNA antisense strand against b2GPI
gucuugaugggaaugggcauu

SEQ ID NO: 1851 - RNA, 21 nt, Artificial Seqence
  Synthetic siRNA antisense strand against b2GPI
ggucuugaugggaaugggcau

SEQ ID NO: 1852 - RNA, 21 nt, Artificial Seqence
  Synthetic siRNA antisense strand against b2GPI
uggucuugaugggaaugggca

SEQ ID NO: 1853 - RNA, 21 nt, Artificial Seqence
  Synthetic siRNA antisense strand against b2GPI
cuggucuugaugggaaugggc

SEQ ID NO: 1854 - RNA, 21 nt, Artificial Seqence
  Synthetic siRNA antisense strand against b2GPI
ucuggucuugaugggaauggg

SEQ ID NO: 1855 - RNA, 21 nt, Artificial Seqence
  Synthetic siRNA antisense strand against b2GPI
gucuggucuugaugggaaugg

SEQ ID NO: 1856 - RNA, 21 nt, Artificial Seqence
  Synthetic siRNA antisense strand against b2GPI
ugucuggucuugaugggaaug

SEQ ID NO: 1857 - RNA, 21 nt, Artificial Seqence
  Synthetic siRNA antisense strand against b2GPI
uugucuggucuugaugggaau

SEQ ID NO: 1858 - RNA, 21 nt, Artificial Seqence
  Synthetic siRNA antisense strand against b2GPI
auugucuggucuugaugggaa

SEQ ID NO: 1859 - RNA, 21 nt, Artificial Seqence
  Synthetic siRNA antisense strand against b2GPI
cauugucuggucuugauggga

SEQ ID NO: 1860 - RNA, 21 nt, Artificial Seqence
  Synthetic siRNA antisense strand against b2GPI
ccauugucuggucuugauggg

SEQ ID NO: 1861 - RNA, 21 nt, Artificial Seqence
  Synthetic siRNA antisense strand against b2GPI
uccauugucuggucuugaugg

SEQ ID NO: 1862 - RNA, 21 nt, Artificial Seqence
  Synthetic siRNA antisense strand against b2GPI
auccauugucuggucuugaug

SEQ ID NO: 1863 - RNA, 21 nt, Artificial Seqence
  Synthetic siRNA antisense strand against b2GPI
aauccauugucuggucuugau

SEQ ID NO: 1864 - RNA, 21 nt, Artificial Seqence
  Synthetic siRNA antisense strand against b2GPI
aaauccauugucuggucuuga

SEQ ID NO: 1865 - RNA, 21 nt, Artificial Seqence
  Synthetic siRNA antisense strand against b2GPI
caaauccauugucuggucuug

SEQ ID NO: 1866 - RNA, 21 nt, Artificial Seqence
  Synthetic siRNA antisense strand against b2GPI
acaaauccauugucuggucuu

SEQ ID NO: 1867 - RNA, 21 nt, Artificial Seqence
  Synthetic siRNA antisense strand against b2GPI
cacaaauccauugucuggucu

SEQ ID NO: 1868 - RNA, 21 nt, Artificial Seqence
  Synthetic siRNA antisense strand against b2GPI
ucacaaauccauugucugguc

SEQ ID NO: 1869 - RNA, 21 nt, Artificial Seqence
  Synthetic siRNA antisense strand against b2GPI
uucacaaauccauugucuggu

SEQ ID NO: 1870 - RNA, 21 nt, Artificial Seqence
  Synthetic siRNA antisense strand against b2GPI
guucacaaauccauugucugg

SEQ ID NO: 1871 - RNA, 21 nt, Artificial Seqence
  Synthetic siRNA antisense strand against b2GPI
aguucacaaauccauugucug

SEQ ID NO: 1872 - RNA, 21 nt, Artificial Seqence
  Synthetic siRNA antisense strand against b2GPI
uaguucacaaauccauugucu

SEQ ID NO: 1873 - RNA, 21 nt, Artificial Seqence
  Synthetic siRNA antisense strand against b2GPI
auaguucacaaauccauuguc

SEQ ID NO: 1874 - RNA, 21 nt, Artificial Seqence
  Synthetic siRNA antisense strand against b2GPI
gauaguucacaaauccauugu

SEQ ID NO: 1875 - RNA, 21 nt, Artificial Seqence
  Synthetic siRNA antisense strand against b2GPI
ggauaguucacaaauccauug

SEQ ID NO: 1876 - RNA, 21 nt, Artificial Seqence
  Synthetic siRNA antisense strand against b2GPI
aggauaguucacaaauccauu

SEQ ID NO: 1877 - RNA, 21 nt, Artificial Seqence
  Synthetic siRNA antisense strand against b2GPI
caggauaguucacaaauccau

SEQ ID NO: 1878 - RNA, 21 nt, Artificial Seqence
  Synthetic siRNA antisense strand against b2GPI
gcaggauaguucacaaaucca

SEQ ID NO: 1879 - RNA, 21 nt, Artificial Seqence
  Synthetic siRNA antisense strand against b2GPI
ugcaggauaguucacaaaucc

SEQ ID NO: 1880 - RNA, 21 nt, Artificial Seqence
  Synthetic siRNA antisense strand against b2GPI
uugcaggauaguucacaaauc

SEQ ID NO: 1881 - RNA, 21 nt, Artificial Seqence
  Synthetic siRNA antisense strand against b2GPI
uuugcaggauaguucacaaau

SEQ ID NO: 1882 - RNA, 21 nt, Artificial Seqence
  Synthetic siRNA antisense strand against b2GPI
uuuugcaggauaguucacaaa

SEQ ID NO: 1883 - RNA, 21 nt, Artificial Seqence
  Synthetic siRNA antisense strand against b2GPI
guuuugcaggauaguucacaa

SEQ ID NO: 1884 - RNA, 21 nt, Artificial Seqence
  Synthetic siRNA antisense strand against b2GPI
gguuuugcaggauaguucaca

SEQ ID NO: 1885 - RNA, 21 nt, Artificial Seqence
  Synthetic siRNA antisense strand against b2GPI
ugguuuugcaggauaguucac

SEQ ID NO: 1886 - RNA, 21 nt, Artificial Seqence
  Synthetic siRNA antisense strand against b2GPI
uugguuuugcaggauaguuca

SEQ ID NO: 1887 - RNA, 21 nt, Artificial Seqence
  Synthetic siRNA antisense strand against b2GPI
guugguuuugcaggauaguuc

SEQ ID NO: 1888 - RNA, 21 nt, Artificial Seqence
  Synthetic siRNA antisense strand against b2GPI
uguugguuuugcaggauaguu

SEQ ID NO: 1889 - RNA, 21 nt, Artificial Seqence
  Synthetic siRNA antisense strand against b2GPI
guguugguuuugcaggauagu

SEQ ID NO: 1890 - RNA, 21 nt, Artificial Seqence
  Synthetic siRNA antisense strand against b2GPI
aguguugguuuugcaggauag

SEQ ID NO: 1891 - RNA, 21 nt, Artificial Seqence
  Synthetic siRNA antisense strand against b2GPI
aaguguugguuuugcaggaua

SEQ ID NO: 1892 - RNA, 21 nt, Artificial Seqence
  Synthetic siRNA antisense strand against b2GPI
aaaguguugguuuugcaggau

SEQ ID NO: 1893 - RNA, 21 nt, Artificial Seqence
  Synthetic siRNA antisense strand against b2GPI
uaaaguguugguuuugcagga

SEQ ID NO: 1894 - RNA, 21 nt, Artificial Seqence
  Synthetic siRNA antisense strand against b2GPI
auaaaguguugguuuugcagg

SEQ ID NO: 1895 - RNA, 21 nt, Artificial Seqence
  Synthetic siRNA antisense strand against b2GPI
aauaaaguguugguuuugcag

SEQ ID NO: 1896 - RNA, 21 nt, Artificial Seqence
  Synthetic siRNA antisense strand against b2GPI
uaauaaaguguugguuuugca

SEQ ID NO: 1897 - RNA, 21 nt, Artificial Seqence
  Synthetic siRNA antisense strand against b2GPI
guaauaaaguguugguuuugc

SEQ ID NO: 1898 - RNA, 21 nt, Artificial Seqence
  Synthetic siRNA antisense strand against b2GPI
uguaauaaaguguugguuuug

SEQ ID NO: 1899 - RNA, 21 nt, Artificial Seqence
  Synthetic siRNA antisense strand against b2GPI
uuguaauaaaguguugguuuu

SEQ ID NO: 1900 - RNA, 21 nt, Artificial Seqence
  Synthetic siRNA antisense strand against b2GPI
cuuguaauaaaguguugguuu

SEQ ID NO: 1901 - RNA, 21 nt, Artificial Seqence
  Synthetic siRNA antisense strand against b2GPI
ccuuguaauaaaguguugguu

SEQ ID NO: 1902 - RNA, 21 nt, Artificial Seqence
  Synthetic siRNA antisense strand against b2GPI
uccuuguaauaaaguguuggu

SEQ ID NO: 1903 - RNA, 21 nt, Artificial Seqence
  Synthetic siRNA antisense strand against b2GPI
auccuuguaauaaaguguugg

SEQ ID NO: 1904 - RNA, 21 nt, Artificial Seqence
  Synthetic siRNA antisense strand against b2GPI
uauccuuguaauaaaguguug

SEQ ID NO: 1905 - RNA, 21 nt, Artificial Seqence
  Synthetic siRNA antisense strand against b2GPI
uuauccuuguaauaaaguguu

SEQ ID NO: 1906 - RNA, 21 nt, Artificial Seqence
  Synthetic siRNA antisense strand against b2GPI
uuuauccuuguaauaaagugu

SEQ ID NO: 1907 - RNA, 21 nt, Artificial Seqence
  Synthetic siRNA antisense strand against b2GPI
cuuuauccuuguaauaaagug

SEQ ID NO: 1908 - RNA, 21 nt, Artificial Seqence
  Synthetic siRNA antisense strand against b2GPI
gcuuuauccuuguaauaaagu

SEQ ID NO: 1909 - RNA, 21 nt, Artificial Seqence
  Synthetic siRNA antisense strand against b2GPI
ggcuuuauccuuguaauaaag

SEQ ID NO: 1910 - RNA, 21 nt, Artificial Seqence
  Synthetic siRNA antisense strand against b2GPI
uggcuuuauccuuguaauaaa

SEQ ID NO: 1911 - RNA, 21 nt, Artificial Seqence
  Synthetic siRNA antisense strand against b2GPI
guggcuuuauccuuguaauaa

SEQ ID NO: 1912 - RNA, 21 nt, Artificial Seqence
  Synthetic siRNA antisense strand against b2GPI
uguggcuuuauccuuguaaua

SEQ ID NO: 1913 - RNA, 21 nt, Artificial Seqence
  Synthetic siRNA antisense strand against b2GPI
auguggcuuuauccuuguaau

SEQ ID NO: 1914 - RNA, 21 nt, Artificial Seqence
  Synthetic siRNA antisense strand against b2GPI
aauguggcuuuauccuuguaa

SEQ ID NO: 1915 - RNA, 21 nt, Artificial Seqence
  Synthetic siRNA antisense strand against b2GPI
aaauguggcuuuauccuugua

SEQ ID NO: 1916 - RNA, 21 nt, Artificial Seqence
  Synthetic siRNA antisense strand against b2GPI
caaauguggcuuuauccuugu

SEQ ID NO: 1917 - RNA, 21 nt, Artificial Seqence
  Synthetic siRNA antisense strand against b2GPI
ccaaauguggcuuuauccuug

SEQ ID NO: 1918 - RNA, 21 nt, Artificial Seqence
  Synthetic siRNA antisense strand against b2GPI
gccaaauguggcuuuauccuu

SEQ ID NO: 1919 - RNA, 21 nt, Artificial Seqence
  Synthetic siRNA antisense strand against b2GPI
agccaaauguggcuuuauccu

SEQ ID NO: 1920 - RNA, 21 nt, Artificial Seqence
  Synthetic siRNA antisense strand against b2GPI
cagccaaauguggcuuuaucc

SEQ ID NO: 1921 - RNA, 21 nt, Artificial Seqence
  Synthetic siRNA antisense strand against b2GPI
gcagccaaauguggcuuuauc

SEQ ID NO: 1922 - RNA, 21 nt, Artificial Seqence
  Synthetic siRNA antisense strand against b2GPI
ggcagccaaauguggcuuuau

SEQ ID NO: 1923 - RNA, 21 nt, Artificial Seqence
  Synthetic siRNA antisense strand against b2GPI
uggcagccaaauguggcuuua

SEQ ID NO: 1924 - RNA, 21 nt, Artificial Seqence
  Synthetic siRNA antisense strand against b2GPI
auggcagccaaauguggcuuu

SEQ ID NO: 1925 - RNA, 21 nt, Artificial Seqence
  Synthetic siRNA antisense strand against b2GPI
cauggcagccaaauguggcuu

SEQ ID NO: 1926 - RNA, 21 nt, Artificial Seqence
  Synthetic siRNA antisense strand against b2GPI
ucauggcagccaaauguggcu

SEQ ID NO: 1927 - RNA, 21 nt, Artificial Seqence
  Synthetic siRNA antisense strand against b2GPI
aucauggcagccaaauguggc

SEQ ID NO: 1928 - RNA, 21 nt, Artificial Seqence
  Synthetic siRNA antisense strand against b2GPI
caucauggcagccaaaugugg

SEQ ID NO: 1929 - RNA, 21 nt, Artificial Seqence
  Synthetic siRNA antisense strand against b2GPI
ccaucauggcagccaaaugug

SEQ ID NO: 1930 - RNA, 21 nt, Artificial Seqence
  Synthetic siRNA antisense strand against b2GPI
uccaucauggcagccaaaugu

SEQ ID NO: 1931 - RNA, 21 nt, Artificial Seqence
  Synthetic siRNA antisense strand against b2GPI
auccaucauggcagccaaaug

SEQ ID NO: 1932 - RNA, 21 nt, Artificial Seqence
  Synthetic siRNA antisense strand against b2GPI
uauccaucauggcagccaaau

SEQ ID NO: 1933 - RNA, 21 nt, Artificial Seqence
  Synthetic siRNA antisense strand against b2GPI
auauccaucauggcagccaaa

SEQ ID NO: 1934 - RNA, 21 nt, Artificial Seqence
  Synthetic siRNA antisense strand against b2GPI
aauauccaucauggcagccaa

SEQ ID NO: 1935 - RNA, 21 nt, Artificial Seqence
  Synthetic siRNA antisense strand against b2GPI
gaauauccaucauggcagcca

SEQ ID NO: 1936 - RNA, 21 nt, Artificial Seqence
  Synthetic siRNA antisense strand against b2GPI
agaauauccaucauggcagcc

SEQ ID NO: 1937 - RNA, 21 nt, Artificial Seqence
  Synthetic siRNA antisense strand against b2GPI
gagaauauccaucauggcagc

SEQ ID NO: 1938 - RNA, 21 nt, Artificial Seqence
  Synthetic siRNA antisense strand against b2GPI
agagaauauccaucauggcag

SEQ ID NO: 1939 - RNA, 21 nt, Artificial Seqence
  Synthetic siRNA antisense strand against b2GPI
cagagaauauccaucauggca

SEQ ID NO: 1940 - RNA, 21 nt, Artificial Seqence
  Synthetic siRNA antisense strand against b2GPI
ccagagaauauccaucauggc

SEQ ID NO: 1941 - RNA, 21 nt, Artificial Seqence
  Synthetic siRNA antisense strand against b2GPI
uccagagaauauccaucaugg

SEQ ID NO: 1942 - RNA, 21 nt, Artificial Seqence
  Synthetic siRNA antisense strand against b2GPI
auccagagaauauccaucaug

SEQ ID NO: 1943 - RNA, 21 nt, Artificial Seqence
  Synthetic siRNA antisense strand against b2GPI
cauccagagaauauccaucau

SEQ ID NO: 1944 - RNA, 21 nt, Artificial Seqence
  Synthetic siRNA antisense strand against b2GPI
ccauccagagaauauccauca

SEQ ID NO: 1945 - RNA, 21 nt, Artificial Seqence
  Synthetic siRNA antisense strand against b2GPI
gccauccagagaauauccauc

SEQ ID NO: 1946 - RNA, 21 nt, Artificial Seqence
  Synthetic siRNA antisense strand against b2GPI
ggccauccagagaauauccau

SEQ ID NO: 1947 - RNA, 21 nt, Artificial Seqence
  Synthetic siRNA antisense strand against b2GPI
gggccauccagagaauaucca

SEQ ID NO: 1948 - RNA, 21 nt, Artificial Seqence
  Synthetic siRNA antisense strand against b2GPI
cgggccauccagagaauaucc

SEQ ID NO: 1949 - RNA, 21 nt, Artificial Seqence
  Synthetic siRNA antisense strand against b2GPI
ccgggccauccagagaauauc

SEQ ID NO: 1950 - RNA, 21 nt, Artificial Seqence
  Synthetic siRNA antisense strand against b2GPI
uccgggccauccagagaauau

SEQ ID NO: 1951 - RNA, 21 nt, Artificial Seqence
  Synthetic siRNA antisense strand against b2GPI
uuccgggccauccagagaaua

SEQ ID NO: 1952 - RNA, 21 nt, Artificial Seqence
  Synthetic siRNA antisense strand against b2GPI
cuuccgggccauccagagaau

SEQ ID NO: 1953 - RNA, 21 nt, Artificial Seqence
  Synthetic siRNA antisense strand against b2GPI
ucuuccgggccauccagagaa

SEQ ID NO: 1954 - RNA, 21 nt, Artificial Seqence
  Synthetic siRNA antisense strand against b2GPI
uucuuccgggccauccagaga

SEQ ID NO: 1955 - RNA, 21 nt, Artificial Seqence
  Synthetic siRNA antisense strand against b2GPI
uuucuuccgggccauccagag

SEQ ID NO: 1956 - RNA, 21 nt, Artificial Seqence
  Synthetic siRNA antisense strand against b2GPI
auuucuuccgggccauccaga

SEQ ID NO: 1957 - RNA, 21 nt, Artificial Seqence
  Synthetic siRNA antisense strand against b2GPI
uauuucuuccgggccauccag

SEQ ID NO: 1958 - RNA, 21 nt, Artificial Seqence
  Synthetic siRNA antisense strand against b2GPI
cuauuucuuccgggccaucca

SEQ ID NO: 1959 - RNA, 21 nt, Artificial Seqence
  Synthetic siRNA antisense strand against b2GPI
ucuauuucuuccgggccaucc

SEQ ID NO: 1960 - RNA, 21 nt, Artificial Seqence
  Synthetic siRNA antisense strand against b2GPI
uucuauuucuuccgggccauc

SEQ ID NO: 1961 - RNA, 21 nt, Artificial Seqence
  Synthetic siRNA antisense strand against b2GPI
auucuauuucuuccgggccau

SEQ ID NO: 1962 - RNA, 21 nt, Artificial Seqence
  Synthetic siRNA antisense strand against b2GPI
cauucuauuucuuccgggcca

SEQ ID NO: 1963 - RNA, 21 nt, Artificial Seqence
  Synthetic siRNA antisense strand against b2GPI
acauucuauuucuuccgggcc

SEQ ID NO: 1964 - RNA, 21 nt, Artificial Seqence
  Synthetic siRNA antisense strand against b2GPI
uacauucuauuucuuccgggc

SEQ ID NO: 1965 - RNA, 21 nt, Artificial Seqence
  Synthetic siRNA antisense strand against b2GPI
guacauucuauuucuuccggg

SEQ ID NO: 1966 - RNA, 21 nt, Artificial Seqence
  Synthetic siRNA antisense strand against b2GPI
gguacauucuauuucuuccgg

SEQ ID NO: 1967 - RNA, 21 nt, Artificial Seqence
  Synthetic siRNA antisense strand against b2GPI
ugguacauucuauuucuuccg

SEQ ID NO: 1968 - RNA, 21 nt, Artificial Seqence
  Synthetic siRNA antisense strand against b2GPI
uugguacauucuauuucuucc

SEQ ID NO: 1969 - RNA, 21 nt, Artificial Seqence
  Synthetic siRNA antisense strand against b2GPI
uuugguacauucuauuucuuc

SEQ ID NO: 1970 - RNA, 21 nt, Artificial Seqence
  Synthetic siRNA antisense strand against b2GPI
guuugguacauucuauuucuu

SEQ ID NO: 1971 - RNA, 21 nt, Artificial Seqence
  Synthetic siRNA antisense strand against b2GPI
aguuugguacauucuauuucu

SEQ ID NO: 1972 - RNA, 21 nt, Artificial Seqence
  Synthetic siRNA antisense strand against b2GPI
caguuugguacauucuauuuc

SEQ ID NO: 1973 - RNA, 21 nt, Artificial Seqence
  Synthetic siRNA antisense strand against b2GPI
ccaguuugguacauucuauuu

SEQ ID NO: 1974 - RNA, 21 nt, Artificial Seqence
  Synthetic siRNA antisense strand against b2GPI
cccaguuugguacauucuauu

SEQ ID NO: 1975 - RNA, 21 nt, Artificial Seqence
  Synthetic siRNA antisense strand against b2GPI
ucccaguuugguacauucuau

SEQ ID NO: 1976 - RNA, 21 nt, Artificial Seqence
  Synthetic siRNA antisense strand against b2GPI
uucccaguuugguacauucua

SEQ ID NO: 1977 - RNA, 21 nt, Artificial Seqence
  Synthetic siRNA antisense strand against b2GPI
uuucccaguuugguacauucu

SEQ ID NO: 1978 - RNA, 21 nt, Artificial Seqence
  Synthetic siRNA antisense strand against b2GPI
guuucccaguuugguacauuc

SEQ ID NO: 1979 - RNA, 21 nt, Artificial Seqence
  Synthetic siRNA antisense strand against b2GPI
aguuucccaguuugguacauu

SEQ ID NO: 1980 - RNA, 21 nt, Artificial Seqence
  Synthetic siRNA antisense strand against b2GPI
caguuucccaguuugguacau

SEQ ID NO: 1981 - RNA, 21 nt, Artificial Seqence
  Synthetic siRNA antisense strand against b2GPI
ccaguuucccaguuugguaca

SEQ ID NO: 1982 - RNA, 21 nt, Artificial Seqence
  Synthetic siRNA antisense strand against b2GPI
accaguuucccaguuugguac

SEQ ID NO: 1983 - RNA, 21 nt, Artificial Seqence
  Synthetic siRNA antisense strand against b2GPI
gaccaguuucccaguuuggua

SEQ ID NO: 1984 - RNA, 21 nt, Artificial Seqence
  Synthetic siRNA antisense strand against b2GPI
agaccaguuucccaguuuggu

SEQ ID NO: 1985 - RNA, 21 nt, Artificial Seqence
  Synthetic siRNA antisense strand against b2GPI
cagaccaguuucccaguuugg

SEQ ID NO: 1986 - RNA, 21 nt, Artificial Seqence
  Synthetic siRNA antisense strand against b2GPI
gcagaccaguuucccaguuug

SEQ ID NO: 1987 - RNA, 21 nt, Artificial Seqence
  Synthetic siRNA antisense strand against b2GPI
ggcagaccaguuucccaguuu

SEQ ID NO: 1988 - RNA, 21 nt, Artificial Seqence
  Synthetic siRNA antisense strand against b2GPI
uggcagaccaguuucccaguu

SEQ ID NO: 1989 - RNA, 21 nt, Artificial Seqence
  Synthetic siRNA antisense strand against b2GPI
auggcagaccaguuucccagu

SEQ ID NO: 1990 - RNA, 21 nt, Artificial Seqence
  Synthetic siRNA antisense strand against b2GPI
cauggcagaccaguuucccag

SEQ ID NO: 1991 - RNA, 21 nt, Artificial Seqence
  Synthetic siRNA antisense strand against b2GPI
gcauggcagaccaguuuccca

SEQ ID NO: 1992 - RNA, 21 nt, Artificial Seqence
  Synthetic siRNA antisense strand against b2GPI
ggcauggcagaccaguuuccc

SEQ ID NO: 1993 - RNA, 21 nt, Artificial Seqence
  Synthetic siRNA antisense strand against b2GPI
uggcauggcagaccaguuucc

SEQ ID NO: 1994 - RNA, 21 nt, Artificial Seqence
  Synthetic siRNA antisense strand against b2GPI
uuggcauggcagaccaguuuc

SEQ ID NO: 1995 - RNA, 21 nt, Artificial Seqence
  Synthetic siRNA antisense strand against b2GPI
cuuggcauggcagaccaguuu

SEQ ID NO: 1996 - RNA, 21 nt, Artificial Seqence
  Synthetic siRNA antisense strand against b2GPI
acuuggcauggcagaccaguu

SEQ ID NO: 1997 - RNA, 21 nt, Artificial Seqence
  Synthetic siRNA antisense strand against b2GPI
aacuuggcauggcagaccagu

SEQ ID NO: 1998 - RNA, 21 nt, Artificial Seqence
  Synthetic siRNA antisense strand against b2GPI
caacuuggcauggcagaccag

SEQ ID NO: 1999 - RNA, 21 nt, Artificial Seqence
  Synthetic siRNA antisense strand against b2GPI
acaacuuggcauggcagacca

SEQ ID NO: 2000 - RNA, 21 nt, Artificial Seqence
  Synthetic siRNA antisense strand against b2GPI
uacaacuuggcauggcagacc

SEQ ID NO: 2001 - RNA, 21 nt, Artificial Seqence
  Synthetic siRNA antisense strand against b2GPI
uuacaacuuggcauggcagac

SEQ ID NO: 2002 - RNA, 21 nt, Artificial Seqence
  Synthetic siRNA antisense strand against b2GPI
uuuacaacuuggcauggcaga

SEQ ID NO: 2003 - RNA, 21 nt, Artificial Seqence
  Synthetic siRNA antisense strand against b2GPI
cuuuacaacuuggcauggcag

SEQ ID NO: 2004 - RNA, 21 nt, Artificial Seqence
  Synthetic siRNA antisense strand against b2GPI
gcuuuacaacuuggcauggca

SEQ ID NO: 2005 - RNA, 21 nt, Artificial Seqence
  Synthetic siRNA antisense strand against b2GPI
ugcuuuacaacuuggcauggc

SEQ ID NO: 2006 - RNA, 21 nt, Artificial Seqence
  Synthetic siRNA antisense strand against b2GPI
augcuuuacaacuuggcaugg

SEQ ID NO: 2007 - RNA, 21 nt, Artificial Seqence
  Synthetic siRNA antisense strand against b2GPI
gaugcuuuacaacuuggcaug

SEQ ID NO: 2008 - RNA, 21 nt, Artificial Seqence
  Synthetic siRNA antisense strand against b2GPI
agaugcuuuacaacuuggcau

SEQ ID NO: 2009 - RNA, 21 nt, Artificial Seqence
  Synthetic siRNA antisense strand against b2GPI
aagaugcuuuacaacuuggca

SEQ ID NO: 2010 - RNA, 21 nt, Artificial Seqence
  Synthetic siRNA antisense strand against b2GPI
caagaugcuuuacaacuuggc

SEQ ID NO: 2011 - RNA, 21 nt, Artificial Seqence
  Synthetic siRNA antisense strand against b2GPI
acaagaugcuuuacaacuugg

SEQ ID NO: 2012 - RNA, 21 nt, Artificial Seqence
  Synthetic siRNA antisense strand against b2GPI
uacaagaugcuuuacaacuug

SEQ ID NO: 2013 - RNA, 21 nt, Artificial Seqence
  Synthetic siRNA antisense strand against b2GPI
uuacaagaugcuuuacaacuu

SEQ ID NO: 2014 - RNA, 21 nt, Artificial Seqence
  Synthetic siRNA antisense strand against b2GPI
uuuacaagaugcuuuacaacu

SEQ ID NO: 2015 - RNA, 21 nt, Artificial Seqence
  Synthetic siRNA antisense strand against b2GPI
cuuuacaagaugcuuuacaac

SEQ ID NO: 2016 - RNA, 21 nt, Artificial Seqence
  Synthetic siRNA antisense strand against b2GPI
acuuuacaagaugcuuuacaa

SEQ ID NO: 2017 - RNA, 21 nt, Artificial Seqence
  Synthetic siRNA antisense strand against b2GPI
uacuuuacaagaugcuuuaca

SEQ ID NO: 2018 - RNA, 21 nt, Artificial Seqence
  Synthetic siRNA antisense strand against b2GPI
guacuuuacaagaugcuuuac

SEQ ID NO: 2019 - RNA, 21 nt, Artificial Seqence
  Synthetic siRNA antisense strand against b2GPI
gguacuuuacaagaugcuuua

SEQ ID NO: 2020 - RNA, 21 nt, Artificial Seqence
  Synthetic siRNA antisense strand against b2GPI
agguacuuuacaagaugcuuu

SEQ ID NO: 2021 - RNA, 21 nt, Artificial Seqence
  Synthetic siRNA antisense strand against b2GPI
cagguacuuuacaagaugcuu

SEQ ID NO: 2022 - RNA, 21 nt, Artificial Seqence
  Synthetic siRNA antisense strand against b2GPI
acagguacuuuacaagaugcu

SEQ ID NO: 2023 - RNA, 21 nt, Artificial Seqence
  Synthetic siRNA antisense strand against b2GPI
cacagguacuuuacaagaugc

SEQ ID NO: 2024 - RNA, 21 nt, Artificial Seqence
  Synthetic siRNA antisense strand against b2GPI
ucacagguacuuuacaagaug

SEQ ID NO: 2025 - RNA, 21 nt, Artificial Seqence
  Synthetic siRNA antisense strand against b2GPI
uucacagguacuuuacaagau

SEQ ID NO: 2026 - RNA, 21 nt, Artificial Seqence
  Synthetic siRNA antisense strand against b2GPI
uuucacagguacuuuacaaga

SEQ ID NO: 2027 - RNA, 21 nt, Artificial Seqence
  Synthetic siRNA antisense strand against b2GPI
uuuucacagguacuuuacaag

SEQ ID NO: 2028 - RNA, 21 nt, Artificial Seqence
  Synthetic siRNA antisense strand against b2GPI
uuuuucacagguacuuuacaa

SEQ ID NO: 2029 - RNA, 21 nt, Artificial Seqence
  Synthetic siRNA antisense strand against b2GPI
uuuuuucacagguacuuuaca

SEQ ID NO: 2030 - RNA, 21 nt, Artificial Seqence
  Synthetic siRNA antisense strand against b2GPI
cuuuuuucacagguacuuuac

SEQ ID NO: 2031 - RNA, 21 nt, Artificial Seqence
  Synthetic siRNA antisense strand against b2GPI
gcuuuuuucacagguacuuua

SEQ ID NO: 2032 - RNA, 21 nt, Artificial Seqence
  Synthetic siRNA antisense strand against b2GPI
ggcuuuuuucacagguacuuu

SEQ ID NO: 2033 - RNA, 21 nt, Artificial Seqence
  Synthetic siRNA antisense strand against b2GPI
uggcuuuuuucacagguacuu

SEQ ID NO: 2034 - RNA, 21 nt, Artificial Seqence
  Synthetic siRNA antisense strand against b2GPI
guggcuuuuuucacagguacu

SEQ ID NO: 2035 - RNA, 21 nt, Artificial Seqence
  Synthetic siRNA antisense strand against b2GPI
aguggcuuuuuucacagguac

SEQ ID NO: 2036 - RNA, 21 nt, Artificial Seqence
  Synthetic siRNA antisense strand against b2GPI
caguggcuuuuuucacaggua

SEQ ID NO: 2037 - RNA, 21 nt, Artificial Seqence
  Synthetic siRNA antisense strand against b2GPI
acaguggcuuuuuucacaggu

SEQ ID NO: 2038 - RNA, 21 nt, Artificial Seqence
  Synthetic siRNA antisense strand against b2GPI
cacaguggcuuuuuucacagg

SEQ ID NO: 2039 - RNA, 21 nt, Artificial Seqence
  Synthetic siRNA antisense strand against b2GPI
ccacaguggcuuuuuucacag

SEQ ID NO: 2040 - RNA, 21 nt, Artificial Seqence
  Synthetic siRNA antisense strand against b2GPI
accacaguggcuuuuuucaca

SEQ ID NO: 2041 - RNA, 21 nt, Artificial Seqence
  Synthetic siRNA antisense strand against b2GPI
caccacaguggcuuuuuucac

SEQ ID NO: 2042 - RNA, 21 nt, Artificial Seqence
  Synthetic siRNA antisense strand against b2GPI
acaccacaguggcuuuuuuca

SEQ ID NO: 2043 - RNA, 21 nt, Artificial Seqence
  Synthetic siRNA antisense strand against b2GPI
uacaccacaguggcuuuuuuc

SEQ ID NO: 2044 - RNA, 21 nt, Artificial Seqence
  Synthetic siRNA antisense strand against b2GPI
guacaccacaguggcuuuuuu

SEQ ID NO: 2045 - RNA, 21 nt, Artificial Seqence
  Synthetic siRNA antisense strand against b2GPI
gguacaccacaguggcuuuuu

SEQ ID NO: 2046 - RNA, 21 nt, Artificial Seqence
  Synthetic siRNA antisense strand against b2GPI
ugguacaccacaguggcuuuu

SEQ ID NO: 2047 - RNA, 21 nt, Artificial Seqence
  Synthetic siRNA antisense strand against b2GPI
uugguacaccacaguggcuuu

SEQ ID NO: 2048 - RNA, 21 nt, Artificial Seqence
  Synthetic siRNA antisense strand against b2GPI
cuugguacaccacaguggcuu

SEQ ID NO: 2049 - RNA, 21 nt, Artificial Seqence
  Synthetic siRNA antisense strand against b2GPI
ccuugguacaccacaguggcu

SEQ ID NO: 2050 - RNA, 21 nt, Artificial Seqence
  Synthetic siRNA antisense strand against b2GPI
uccuugguacaccacaguggc

SEQ ID NO: 2051 - RNA, 21 nt, Artificial Seqence
  Synthetic siRNA antisense strand against b2GPI
cuccuugguacaccacagugg

SEQ ID NO: 2052 - RNA, 21 nt, Artificial Seqence
  Synthetic siRNA antisense strand against b2GPI
ucuccuugguacaccacagug

SEQ ID NO: 2053 - RNA, 21 nt, Artificial Seqence
  Synthetic siRNA antisense strand against b2GPI
cucuccuugguacaccacagu

SEQ ID NO: 2054 - RNA, 21 nt, Artificial Seqence
  Synthetic siRNA antisense strand against b2GPI
ucucuccuugguacaccacag

SEQ ID NO: 2055 - RNA, 21 nt, Artificial Seqence
  Synthetic siRNA antisense strand against b2GPI
cucucuccuugguacaccaca

SEQ ID NO: 2056 - RNA, 21 nt, Artificial Seqence
  Synthetic siRNA antisense strand against b2GPI
ucucucuccuugguacaccac

SEQ ID NO: 2057 - RNA, 21 nt, Artificial Seqence
  Synthetic siRNA antisense strand against b2GPI
cucucucuccuugguacacca

SEQ ID NO: 2058 - RNA, 21 nt, Artificial Seqence
  Synthetic siRNA antisense strand against b2GPI
acucucucuccuugguacacc

SEQ ID NO: 2059 - RNA, 21 nt, Artificial Seqence
  Synthetic siRNA antisense strand against b2GPI
uacucucucuccuugguacac

SEQ ID NO: 2060 - RNA, 21 nt, Artificial Seqence
  Synthetic siRNA antisense strand against b2GPI
uuacucucucuccuugguaca

SEQ ID NO: 2061 - RNA, 21 nt, Artificial Seqence
  Synthetic siRNA antisense strand against b2GPI
uuuacucucucuccuugguac

SEQ ID NO: 2062 - RNA, 21 nt, Artificial Seqence
  Synthetic siRNA antisense strand against b2GPI
cuuuacucucucuccuuggua

SEQ ID NO: 2063 - RNA, 21 nt, Artificial Seqence
  Synthetic siRNA antisense strand against b2GPI
ucuuuacucucucuccuuggu

SEQ ID NO: 2064 - RNA, 21 nt, Artificial Seqence
  Synthetic siRNA antisense strand against b2GPI
aucuuuacucucucuccuugg

SEQ ID NO: 2065 - RNA, 21 nt, Artificial Seqence
  Synthetic siRNA antisense strand against b2GPI
aaucuuuacucucucuccuug

SEQ ID NO: 2066 - RNA, 21 nt, Artificial Seqence
  Synthetic siRNA antisense strand against b2GPI
gaaucuuuacucucucuccuu

SEQ ID NO: 2067 - RNA, 21 nt, Artificial Seqence
  Synthetic siRNA antisense strand against b2GPI
ugaaucuuuacucucucuccu

SEQ ID NO: 2068 - RNA, 21 nt, Artificial Seqence
  Synthetic siRNA antisense strand against b2GPI
cugaaucuuuacucucucucc

SEQ ID NO: 2069 - RNA, 21 nt, Artificial Seqence
  Synthetic siRNA antisense strand against b2GPI
ccugaaucuuuacucucucuc

SEQ ID NO: 2070 - RNA, 21 nt, Artificial Seqence
  Synthetic siRNA antisense strand against b2GPI
uccugaaucuuuacucucucu

SEQ ID NO: 2071 - RNA, 21 nt, Artificial Seqence
  Synthetic siRNA antisense strand against b2GPI
uuccugaaucuuuacucucuc

SEQ ID NO: 2072 - RNA, 21 nt, Artificial Seqence
  Synthetic siRNA antisense strand against b2GPI
uuuccugaaucuuuacucucu

SEQ ID NO: 2073 - RNA, 21 nt, Artificial Seqence
  Synthetic siRNA antisense strand against b2GPI
uuuuccugaaucuuuacucuc

SEQ ID NO: 2074 - RNA, 21 nt, Artificial Seqence
  Synthetic siRNA antisense strand against b2GPI
uuuuuccugaaucuuuacucu

SEQ ID NO: 2075 - RNA, 21 nt, Artificial Seqence
  Synthetic siRNA antisense strand against b2GPI
auuuuuccugaaucuuuacuc

SEQ ID NO: 2076 - RNA, 21 nt, Artificial Seqence
  Synthetic siRNA antisense strand against b2GPI
aauuuuuccugaaucuuuacu

SEQ ID NO: 2077 - RNA, 21 nt, Artificial Seqence
  Synthetic siRNA antisense strand against b2GPI
aaauuuuuccugaaucuuuac

SEQ ID NO: 2078 - RNA, 21 nt, Artificial Seqence
  Synthetic siRNA antisense strand against b2GPI
uaaauuuuuccugaaucuuua

SEQ ID NO: 2079 - RNA, 21 nt, Artificial Seqence
  Synthetic siRNA antisense strand against b2GPI
uuaaauuuuuccugaaucuuu

SEQ ID NO: 2080 - RNA, 21 nt, Artificial Seqence
  Synthetic siRNA antisense strand against b2GPI
cuuaaauuuuuccugaaucuu

SEQ ID NO: 2081 - RNA, 21 nt, Artificial Seqence
  Synthetic siRNA antisense strand against b2GPI
ucuuaaauuuuuccugaaucu

SEQ ID NO: 2082 - RNA, 21 nt, Artificial Seqence
  Synthetic siRNA antisense strand against b2GPI
uucuuaaauuuuuccugaauc

SEQ ID NO: 2083 - RNA, 21 nt, Artificial Seqence
  Synthetic siRNA antisense strand against b2GPI
auucuuaaauuuuuccugaau

SEQ ID NO: 2084 - RNA, 21 nt, Artificial Seqence
  Synthetic siRNA antisense strand against b2GPI
cauucuuaaauuuuuccugaa

SEQ ID NO: 2085 - RNA, 21 nt, Artificial Seqence
  Synthetic siRNA antisense strand against b2GPI
ccauucuuaaauuuuuccuga

SEQ ID NO: 2086 - RNA, 21 nt, Artificial Seqence
  Synthetic siRNA antisense strand against b2GPI
uccauucuuaaauuuuuccug

SEQ ID NO: 2087 - RNA, 21 nt, Artificial Seqence
  Synthetic siRNA antisense strand against b2GPI
uuccauucuuaaauuuuuccu

SEQ ID NO: 2088 - RNA, 21 nt, Artificial Seqence
  Synthetic siRNA antisense strand against b2GPI
auuccauucuuaaauuuuucc

SEQ ID NO: 2089 - RNA, 21 nt, Artificial Seqence
  Synthetic siRNA antisense strand against b2GPI
cauuccauucuuaaauuuuuc

SEQ ID NO: 2090 - RNA, 21 nt, Artificial Seqence
  Synthetic siRNA antisense strand against b2GPI
gcauuccauucuuaaauuuuu

SEQ ID NO: 2091 - RNA, 21 nt, Artificial Seqence
  Synthetic siRNA antisense strand against b2GPI
agcauuccauucuuaaauuuu

SEQ ID NO: 2092 - RNA, 21 nt, Artificial Seqence
  Synthetic siRNA antisense strand against b2GPI
uagcauuccauucuuaaauuu

SEQ ID NO: 2093 - RNA, 21 nt, Artificial Seqence
  Synthetic siRNA antisense strand against b2GPI
guagcauuccauucuuaaauu

SEQ ID NO: 2094 - RNA, 21 nt, Artificial Seqence
  Synthetic siRNA antisense strand against b2GPI
uguagcauuccauucuuaaau

SEQ ID NO: 2095 - RNA, 21 nt, Artificial Seqence
  Synthetic siRNA antisense strand against b2GPI
auguagcauuccauucuuaaa

SEQ ID NO: 2096 - RNA, 21 nt, Artificial Seqence
  Synthetic siRNA antisense strand against b2GPI
cauguagcauuccauucuuaa

SEQ ID NO: 2097 - RNA, 21 nt, Artificial Seqence
  Synthetic siRNA antisense strand against b2GPI
ccauguagcauuccauucuua

SEQ ID NO: 2098 - RNA, 21 nt, Artificial Seqence
  Synthetic siRNA antisense strand against b2GPI
accauguagcauuccauucuu

SEQ ID NO: 2099 - RNA, 21 nt, Artificial Seqence
  Synthetic siRNA antisense strand against b2GPI
caccauguagcauuccauucu

SEQ ID NO: 2100 - RNA, 21 nt, Artificial Seqence
  Synthetic siRNA antisense strand against b2GPI
ucaccauguagcauuccauuc

SEQ ID NO: 2101 - RNA, 21 nt, Artificial Seqence
  Synthetic siRNA antisense strand against b2GPI
aucaccauguagcauuccauu

SEQ ID NO: 2102 - RNA, 21 nt, Artificial Seqence
  Synthetic siRNA antisense strand against b2GPI
uaucaccauguagcauuccau

SEQ ID NO: 2103 - RNA, 21 nt, Artificial Seqence
  Synthetic siRNA antisense strand against b2GPI
uuaucaccauguagcauucca

SEQ ID NO: 2104 - RNA, 21 nt, Artificial Seqence
  Synthetic siRNA antisense strand against b2GPI
uuuaucaccauguagcauucc

SEQ ID NO: 2105 - RNA, 21 nt, Artificial Seqence
  Synthetic siRNA antisense strand against b2GPI
cuuuaucaccauguagcauuc

SEQ ID NO: 2106 - RNA, 21 nt, Artificial Seqence
  Synthetic siRNA antisense strand against b2GPI
acuuuaucaccauguagcauu

SEQ ID NO: 2107 - RNA, 21 nt, Artificial Seqence
  Synthetic siRNA antisense strand against b2GPI
aacuuuaucaccauguagcau

SEQ ID NO: 2108 - RNA, 21 nt, Artificial Seqence
  Synthetic siRNA antisense strand against b2GPI
aaacuuuaucaccauguagca

SEQ ID NO: 2109 - RNA, 21 nt, Artificial Seqence
  Synthetic siRNA antisense strand against b2GPI
gaaacuuuaucaccauguagc

SEQ ID NO: 2110 - RNA, 21 nt, Artificial Seqence
  Synthetic siRNA antisense strand against b2GPI
agaaacuuuaucaccauguag

SEQ ID NO: 2111 - RNA, 21 nt, Artificial Seqence
  Synthetic siRNA antisense strand against b2GPI
aagaaacuuuaucaccaugua

SEQ ID NO: 2112 - RNA, 21 nt, Artificial Seqence
  Synthetic siRNA antisense strand against b2GPI
aaagaaacuuuaucaccaugu

SEQ ID NO: 2113 - RNA, 21 nt, Artificial Seqence
  Synthetic siRNA antisense strand against b2GPI
gaaagaaacuuuaucaccaug

SEQ ID NO: 2114 - RNA, 21 nt, Artificial Seqence
  Synthetic siRNA antisense strand against b2GPI
agaaagaaacuuuaucaccau

SEQ ID NO: 2115 - RNA, 21 nt, Artificial Seqence
  Synthetic siRNA antisense strand against b2GPI
aagaaagaaacuuuaucacca

SEQ ID NO: 2116 - RNA, 21 nt, Artificial Seqence
  Synthetic siRNA antisense strand against b2GPI
gaagaaagaaacuuuaucacc

SEQ ID NO: 2117 - RNA, 21 nt, Artificial Seqence
  Synthetic siRNA antisense strand against b2GPI
agaagaaagaaacuuuaucac

SEQ ID NO: 2118 - RNA, 21 nt, Artificial Seqence
  Synthetic siRNA antisense strand against b2GPI
cagaagaaagaaacuuuauca

SEQ ID NO: 2119 - RNA, 21 nt, Artificial Seqence
  Synthetic siRNA antisense strand against b2GPI
gcagaagaaagaaacuuuauc

SEQ ID NO: 2120 - RNA, 21 nt, Artificial Seqence
  Synthetic siRNA antisense strand against b2GPI
ugcagaagaaagaaacuuuau

SEQ ID NO: 2121 - RNA, 21 nt, Artificial Seqence
  Synthetic siRNA antisense strand against b2GPI
uugcagaagaaagaaacuuua

SEQ ID NO: 2122 - RNA, 21 nt, Artificial Seqence
  Synthetic siRNA antisense strand against b2GPI
uuugcagaagaaagaaacuuu

SEQ ID NO: 2123 - RNA, 21 nt, Artificial Seqence
  Synthetic siRNA antisense strand against b2GPI
uuuugcagaagaaagaaacuu

SEQ ID NO: 2124 - RNA, 21 nt, Artificial Seqence
  Synthetic siRNA antisense strand against b2GPI
uuuuugcagaagaaagaaacu

SEQ ID NO: 2125 - RNA, 21 nt, Artificial Seqence
  Synthetic siRNA antisense strand against b2GPI
auuuuugcagaagaaagaaac

SEQ ID NO: 2126 - RNA, 21 nt, Artificial Seqence
  Synthetic siRNA antisense strand against b2GPI
uauuuuugcagaagaaagaaa

SEQ ID NO: 2127 - RNA, 21 nt, Artificial Seqence
  Synthetic siRNA antisense strand against b2GPI
uuauuuuugcagaagaaagaa

SEQ ID NO: 2128 - RNA, 21 nt, Artificial Seqence
  Synthetic siRNA antisense strand against b2GPI
cuuauuuuugcagaagaaaga

SEQ ID NO: 2129 - RNA, 21 nt, Artificial Seqence
  Synthetic siRNA antisense strand against b2GPI
ccuuauuuuugcagaagaaag

SEQ ID NO: 2130 - RNA, 21 nt, Artificial Seqence
  Synthetic siRNA antisense strand against b2GPI
uccuuauuuuugcagaagaaa

SEQ ID NO: 2131 - RNA, 21 nt, Artificial Seqence
  Synthetic siRNA antisense strand against b2GPI
uuccuuauuuuugcagaagaa

SEQ ID NO: 2132 - RNA, 21 nt, Artificial Seqence
  Synthetic siRNA antisense strand against b2GPI
uuuccuuauuuuugcagaaga

SEQ ID NO: 2133 - RNA, 21 nt, Artificial Seqence
  Synthetic siRNA antisense strand against b2GPI
uuuuccuuauuuuugcagaag

SEQ ID NO: 2134 - RNA, 21 nt, Artificial Seqence
  Synthetic siRNA antisense strand against b2GPI
cuuuuccuuauuuuugcagaa

SEQ ID NO: 2135 - RNA, 21 nt, Artificial Seqence
  Synthetic siRNA antisense strand against b2GPI
ucuuuuccuuauuuuugcaga

SEQ ID NO: 2136 - RNA, 21 nt, Artificial Seqence
  Synthetic siRNA antisense strand against b2GPI
uucuuuuccuuauuuuugcag

SEQ ID NO: 2137 - RNA, 21 nt, Artificial Seqence
  Synthetic siRNA antisense strand against b2GPI
cuucuuuuccuuauuuuugca

SEQ ID NO: 2138 - RNA, 21 nt, Artificial Seqence
  Synthetic siRNA antisense strand against b2GPI
acuucuuuuccuuauuuuugc

SEQ ID NO: 2139 - RNA, 21 nt, Artificial Seqence
  Synthetic siRNA antisense strand against b2GPI
cacuucuuuuccuuauuuuug

SEQ ID NO: 2140 - RNA, 21 nt, Artificial Seqence
  Synthetic siRNA antisense strand against b2GPI
acacuucuuuuccuuauuuuu

SEQ ID NO: 2141 - RNA, 21 nt, Artificial Seqence
  Synthetic siRNA antisense strand against b2GPI
uacacuucuuuuccuuauuuu

SEQ ID NO: 2142 - RNA, 21 nt, Artificial Seqence
  Synthetic siRNA antisense strand against b2GPI
cuacacuucuuuuccuuauuu

SEQ ID NO: 2143 - RNA, 21 nt, Artificial Seqence
  Synthetic siRNA antisense strand against b2GPI
gcuacacuucuuuuccuuauu

SEQ ID NO: 2144 - RNA, 21 nt, Artificial Seqence
  Synthetic siRNA antisense strand against b2GPI
agcuacacuucuuuuccuuau

SEQ ID NO: 2145 - RNA, 21 nt, Artificial Seqence
  Synthetic siRNA antisense strand against b2GPI
uagcuacacuucuuuuccuua

SEQ ID NO: 2146 - RNA, 21 nt, Artificial Seqence
  Synthetic siRNA antisense strand against b2GPI
auagcuacacuucuuuuccuu

SEQ ID NO: 2147 - RNA, 21 nt, Artificial Seqence
  Synthetic siRNA antisense strand against b2GPI
uauagcuacacuucuuuuccu

SEQ ID NO: 2148 - RNA, 21 nt, Artificial Seqence
  Synthetic siRNA antisense strand against b2GPI
guauagcuacacuucuuuucc

SEQ ID NO: 2149 - RNA, 21 nt, Artificial Seqence
  Synthetic siRNA antisense strand against b2GPI
uguauagcuacacuucuuuuc

SEQ ID NO: 2150 - RNA, 21 nt, Artificial Seqence
  Synthetic siRNA antisense strand against b2GPI
cuguauagcuacacuucuuuu

SEQ ID NO: 2151 - RNA, 21 nt, Artificial Seqence
  Synthetic siRNA antisense strand against b2GPI
ucuguauagcuacacuucuuu

SEQ ID NO: 2152 - RNA, 21 nt, Artificial Seqence
  Synthetic siRNA antisense strand against b2GPI
cucuguauagcuacacuucuu

SEQ ID NO: 2153 - RNA, 21 nt, Artificial Seqence
  Synthetic siRNA antisense strand against b2GPI
ccucuguauagcuacacuucu

SEQ ID NO: 2154 - RNA, 21 nt, Artificial Seqence
  Synthetic siRNA antisense strand against b2GPI
uccucuguauagcuacacuuc

SEQ ID NO: 2155 - RNA, 21 nt, Artificial Seqence
  Synthetic siRNA antisense strand against b2GPI
auccucuguauagcuacacuu

SEQ ID NO: 2156 - RNA, 21 nt, Artificial Seqence
  Synthetic siRNA antisense strand against b2GPI
cauccucuguauagcuacacu

SEQ ID NO: 2157 - RNA, 21 nt, Artificial Seqence
  Synthetic siRNA antisense strand against b2GPI
gcauccucuguauagcuacac

SEQ ID NO: 2158 - RNA, 21 nt, Artificial Seqence
  Synthetic siRNA antisense strand against b2GPI
agcauccucuguauagcuaca

SEQ ID NO: 2159 - RNA, 21 nt, Artificial Seqence
  Synthetic siRNA antisense strand against b2GPI
gagcauccucuguauagcuac

SEQ ID NO: 2160 - RNA, 21 nt, Artificial Seqence
  Synthetic siRNA antisense strand against b2GPI
ugagcauccucuguauagcua

SEQ ID NO: 2161 - RNA, 21 nt, Artificial Seqence
  Synthetic siRNA antisense strand against b2GPI
cugagcauccucuguauagcu

SEQ ID NO: 2162 - RNA, 21 nt, Artificial Seqence
  Synthetic siRNA antisense strand against b2GPI
acugagcauccucuguauagc

SEQ ID NO: 2163 - RNA, 21 nt, Artificial Seqence
  Synthetic siRNA antisense strand against b2GPI
cacugagcauccucuguauag

SEQ ID NO: 2164 - RNA, 21 nt, Artificial Seqence
  Synthetic siRNA antisense strand against b2GPI
acacugagcauccucuguaua

SEQ ID NO: 2165 - RNA, 21 nt, Artificial Seqence
  Synthetic siRNA antisense strand against b2GPI
uacacugagcauccucuguau

SEQ ID NO: 2166 - RNA, 21 nt, Artificial Seqence
  Synthetic siRNA antisense strand against b2GPI
auacacugagcauccucugua

SEQ ID NO: 2167 - RNA, 21 nt, Artificial Seqence
  Synthetic siRNA antisense strand against b2GPI
uauacacugagcauccucugu

SEQ ID NO: 2168 - RNA, 21 nt, Artificial Seqence
  Synthetic siRNA antisense strand against b2GPI
cuauacacugagcauccucug

SEQ ID NO: 2169 - RNA, 21 nt, Artificial Seqence
  Synthetic siRNA antisense strand against b2GPI
ucuauacacugagcauccucu

SEQ ID NO: 2170 - RNA, 21 nt, Artificial Seqence
  Synthetic siRNA antisense strand against b2GPI
aucuauacacugagcauccuc

SEQ ID NO: 2171 - RNA, 21 nt, Artificial Seqence
  Synthetic siRNA antisense strand against b2GPI
caucuauacacugagcauccu

SEQ ID NO: 2172 - RNA, 21 nt, Artificial Seqence
  Synthetic siRNA antisense strand against b2GPI
ccaucuauacacugagcaucc

SEQ ID NO: 2173 - RNA, 21 nt, Artificial Seqence
  Synthetic siRNA antisense strand against b2GPI
gccaucuauacacugagcauc

SEQ ID NO: 2174 - RNA, 21 nt, Artificial Seqence
  Synthetic siRNA antisense strand against b2GPI
ugccaucuauacacugagcau

SEQ ID NO: 2175 - RNA, 21 nt, Artificial Seqence
  Synthetic siRNA antisense strand against b2GPI
gugccaucuauacacugagca

SEQ ID NO: 2176 - RNA, 21 nt, Artificial Seqence
  Synthetic siRNA antisense strand against b2GPI
agugccaucuauacacugagc

SEQ ID NO: 2177 - RNA, 21 nt, Artificial Seqence
  Synthetic siRNA antisense strand against b2GPI
uagugccaucuauacacugag

SEQ ID NO: 2178 - RNA, 21 nt, Artificial Seqence
  Synthetic siRNA antisense strand against b2GPI
auagugccaucuauacacuga

SEQ ID NO: 2179 - RNA, 21 nt, Artificial Seqence
  Synthetic siRNA antisense strand against b2GPI
gauagugccaucuauacacug

SEQ ID NO: 2180 - RNA, 21 nt, Artificial Seqence
  Synthetic siRNA antisense strand against b2GPI
cgauagugccaucuauacacu

SEQ ID NO: 2181 - RNA, 21 nt, Artificial Seqence
  Synthetic siRNA antisense strand against b2GPI
ucgauagugccaucuauacac

SEQ ID NO: 2182 - RNA, 21 nt, Artificial Seqence
  Synthetic siRNA antisense strand against b2GPI
uucgauagugccaucuauaca

SEQ ID NO: 2183 - RNA, 21 nt, Artificial Seqence
  Synthetic siRNA antisense strand against b2GPI
cuucgauagugccaucuauac

SEQ ID NO: 2184 - RNA, 21 nt, Artificial Seqence
  Synthetic siRNA antisense strand against b2GPI
acuucgauagugccaucuaua

SEQ ID NO: 2185 - RNA, 21 nt, Artificial Seqence
  Synthetic siRNA antisense strand against b2GPI
gacuucgauagugccaucuau

SEQ ID NO: 2186 - RNA, 21 nt, Artificial Seqence
  Synthetic siRNA antisense strand against b2GPI
ggacuucgauagugccaucua

SEQ ID NO: 2187 - RNA, 21 nt, Artificial Seqence
  Synthetic siRNA antisense strand against b2GPI
gggacuucgauagugccaucu

SEQ ID NO: 2188 - RNA, 21 nt, Artificial Seqence
  Synthetic siRNA antisense strand against b2GPI
ggggacuucgauagugccauc

SEQ ID NO: 2189 - RNA, 21 nt, Artificial Seqence
  Synthetic siRNA antisense strand against b2GPI
uggggacuucgauagugccau

SEQ ID NO: 2190 - RNA, 21 nt, Artificial Seqence
  Synthetic siRNA antisense strand against b2GPI
uuggggacuucgauagugcca

SEQ ID NO: 2191 - RNA, 21 nt, Artificial Seqence
  Synthetic siRNA antisense strand against b2GPI
uuuggggacuucgauagugcc

SEQ ID NO: 2192 - RNA, 21 nt, Artificial Seqence
  Synthetic siRNA antisense strand against b2GPI
auuuggggacuucgauagugc

SEQ ID NO: 2193 - RNA, 21 nt, Artificial Seqence
  Synthetic siRNA antisense strand against b2GPI
cauuuggggacuucgauagug

SEQ ID NO: 2194 - RNA, 21 nt, Artificial Seqence
  Synthetic siRNA antisense strand against b2GPI
gcauuuggggacuucgauagu

SEQ ID NO: 2195 - RNA, 21 nt, Artificial Seqence
  Synthetic siRNA antisense strand against b2GPI
agcauuuggggacuucgauag

SEQ ID NO: 2196 - RNA, 21 nt, Artificial Seqence
  Synthetic siRNA antisense strand against b2GPI
aagcauuuggggacuucgaua

SEQ ID NO: 2197 - RNA, 21 nt, Artificial Seqence
  Synthetic siRNA antisense strand against b2GPI
gaagcauuuggggacuucgau

SEQ ID NO: 2198 - RNA, 21 nt, Artificial Seqence
  Synthetic siRNA antisense strand against b2GPI
ugaagcauuuggggacuucga

SEQ ID NO: 2199 - RNA, 21 nt, Artificial Seqence
  Synthetic siRNA antisense strand against b2GPI
uugaagcauuuggggacuucg

SEQ ID NO: 2200 - RNA, 21 nt, Artificial Seqence
  Synthetic siRNA antisense strand against b2GPI
cuugaagcauuuggggacuuc

SEQ ID NO: 2201 - RNA, 21 nt, Artificial Seqence
  Synthetic siRNA antisense strand against b2GPI
ccuugaagcauuuggggacuu

SEQ ID NO: 2202 - RNA, 21 nt, Artificial Seqence
  Synthetic siRNA antisense strand against b2GPI
uccuugaagcauuuggggacu

SEQ ID NO: 2203 - RNA, 21 nt, Artificial Seqence
  Synthetic siRNA antisense strand against b2GPI
uuccuugaagcauuuggggac

SEQ ID NO: 2204 - RNA, 21 nt, Artificial Seqence
  Synthetic siRNA antisense strand against b2GPI
guuccuugaagcauuugggga

SEQ ID NO: 2205 - RNA, 21 nt, Artificial Seqence
  Synthetic siRNA antisense strand against b2GPI
uguuccuugaagcauuugggg

SEQ ID NO: 2206 - RNA, 21 nt, Artificial Seqence
  Synthetic siRNA antisense strand against b2GPI
guguuccuugaagcauuuggg

SEQ ID NO: 2207 - RNA, 21 nt, Artificial Seqence
  Synthetic siRNA antisense strand against b2GPI
uguguuccuugaagcauuugg

SEQ ID NO: 2208 - RNA, 21 nt, Artificial Seqence
  Synthetic siRNA antisense strand against b2GPI
cuguguuccuugaagcauuug

SEQ ID NO: 2209 - RNA, 21 nt, Artificial Seqence
  Synthetic siRNA antisense strand against b2GPI
acuguguuccuugaagcauuu

SEQ ID NO: 2210 - RNA, 21 nt, Artificial Seqence
  Synthetic siRNA antisense strand against b2GPI
aacuguguuccuugaagcauu

SEQ ID NO: 2211 - RNA, 21 nt, Artificial Seqence
  Synthetic siRNA antisense strand against b2GPI
gaacuguguuccuugaagcau

SEQ ID NO: 2212 - RNA, 21 nt, Artificial Seqence
  Synthetic siRNA antisense strand against b2GPI
agaacuguguuccuugaagca

SEQ ID NO: 2213 - RNA, 21 nt, Artificial Seqence
  Synthetic siRNA antisense strand against b2GPI
gagaacuguguuccuugaagc

SEQ ID NO: 2214 - RNA, 21 nt, Artificial Seqence
  Synthetic siRNA antisense strand against b2GPI
agagaacuguguuccuugaag

SEQ ID NO: 2215 - RNA, 21 nt, Artificial Seqence
  Synthetic siRNA antisense strand against b2GPI
cagagaacuguguuccuugaa

SEQ ID NO: 2216 - RNA, 21 nt, Artificial Seqence
  Synthetic siRNA antisense strand against b2GPI
ccagagaacuguguuccuuga

SEQ ID NO: 2217 - RNA, 21 nt, Artificial Seqence
  Synthetic siRNA antisense strand against b2GPI
gccagagaacuguguuccuug

SEQ ID NO: 2218 - RNA, 21 nt, Artificial Seqence
  Synthetic siRNA antisense strand against b2GPI
agccagagaacuguguuccuu

SEQ ID NO: 2219 - RNA, 21 nt, Artificial Seqence
  Synthetic siRNA antisense strand against b2GPI
aagccagagaacuguguuccu

SEQ ID NO: 2220 - RNA, 21 nt, Artificial Seqence
  Synthetic siRNA antisense strand against b2GPI
aaagccagagaacuguguucc

SEQ ID NO: 2221 - RNA, 21 nt, Artificial Seqence
  Synthetic siRNA antisense strand against b2GPI
aaaagccagagaacuguguuc

SEQ ID NO: 2222 - RNA, 21 nt, Artificial Seqence
  Synthetic siRNA antisense strand against b2GPI
aaaaagccagagaacuguguu

SEQ ID NO: 2223 - RNA, 21 nt, Artificial Seqence
  Synthetic siRNA antisense strand against b2GPI
caaaaagccagagaacugugu

SEQ ID NO: 2224 - RNA, 21 nt, Artificial Seqence
  Synthetic siRNA antisense strand against b2GPI
ccaaaaagccagagaacugug

SEQ ID NO: 2225 - RNA, 21 nt, Artificial Seqence
  Synthetic siRNA antisense strand against b2GPI
uccaaaaagccagagaacugu

SEQ ID NO: 2226 - RNA, 21 nt, Artificial Seqence
  Synthetic siRNA antisense strand against b2GPI
uuccaaaaagccagagaacug

SEQ ID NO: 2227 - RNA, 21 nt, Artificial Seqence
  Synthetic siRNA antisense strand against b2GPI
uuuccaaaaagccagagaacu

SEQ ID NO: 2228 - RNA, 21 nt, Artificial Seqence
  Synthetic siRNA antisense strand against b2GPI
uuuuccaaaaagccagagaac

SEQ ID NO: 2229 - RNA, 21 nt, Artificial Seqence
  Synthetic siRNA antisense strand against b2GPI
guuuuccaaaaagccagagaa

SEQ ID NO: 2230 - RNA, 21 nt, Artificial Seqence
  Synthetic siRNA antisense strand against b2GPI
aguuuuccaaaaagccagaga

SEQ ID NO: 2231 - RNA, 21 nt, Artificial Seqence
  Synthetic siRNA antisense strand against b2GPI
caguuuuccaaaaagccagag

SEQ ID NO: 2232 - RNA, 21 nt, Artificial Seqence
  Synthetic siRNA antisense strand against b2GPI
ucaguuuuccaaaaagccaga

SEQ ID NO: 2233 - RNA, 21 nt, Artificial Seqence
  Synthetic siRNA antisense strand against b2GPI
aucaguuuuccaaaaagccag

SEQ ID NO: 2234 - RNA, 21 nt, Artificial Seqence
  Synthetic siRNA antisense strand against b2GPI
caucaguuuuccaaaaagcca

SEQ ID NO: 2235 - RNA, 21 nt, Artificial Seqence
  Synthetic siRNA antisense strand against b2GPI
gcaucaguuuuccaaaaagcc

SEQ ID NO: 2236 - RNA, 21 nt, Artificial Seqence
  Synthetic siRNA antisense strand against b2GPI
ugcaucaguuuuccaaaaagc

SEQ ID NO: 2237 - RNA, 21 nt, Artificial Seqence
  Synthetic siRNA antisense strand against b2GPI
augcaucaguuuuccaaaaag

SEQ ID NO: 2238 - RNA, 21 nt, Artificial Seqence
  Synthetic siRNA antisense strand against b2GPI
gaugcaucaguuuuccaaaaa

SEQ ID NO: 2239 - RNA, 21 nt, Artificial Seqence
  Synthetic siRNA antisense strand against b2GPI
ggaugcaucaguuuuccaaaa

SEQ ID NO: 2240 - RNA, 21 nt, Artificial Seqence
  Synthetic siRNA antisense strand against b2GPI
cggaugcaucaguuuuccaaa

SEQ ID NO: 2241 - RNA, 21 nt, Artificial Seqence
  Synthetic siRNA antisense strand against b2GPI
ucggaugcaucaguuuuccaa

SEQ ID NO: 2242 - RNA, 21 nt, Artificial Seqence
  Synthetic siRNA antisense strand against b2GPI
aucggaugcaucaguuuucca

SEQ ID NO: 2243 - RNA, 21 nt, Artificial Seqence
  Synthetic siRNA antisense strand against b2GPI
caucggaugcaucaguuuucc

SEQ ID NO: 2244 - RNA, 21 nt, Artificial Seqence
  Synthetic siRNA antisense strand against b2GPI
acaucggaugcaucaguuuuc

SEQ ID NO: 2245 - RNA, 21 nt, Artificial Seqence
  Synthetic siRNA antisense strand against b2GPI
uacaucggaugcaucaguuuu

SEQ ID NO: 2246 - RNA, 21 nt, Artificial Seqence
  Synthetic siRNA antisense strand against b2GPI
uuacaucggaugcaucaguuu

SEQ ID NO: 2247 - RNA, 21 nt, Artificial Seqence
  Synthetic siRNA antisense strand against b2GPI
uuuacaucggaugcaucaguu

SEQ ID NO: 2248 - RNA, 21 nt, Artificial Seqence
  Synthetic siRNA antisense strand against b2GPI
cuuuacaucggaugcaucagu

SEQ ID NO: 2249 - RNA, 21 nt, Artificial Seqence
  Synthetic siRNA antisense strand against b2GPI
gcuuuacaucggaugcaucag

SEQ ID NO: 2250 - RNA, 21 nt, Artificial Seqence
  Synthetic siRNA antisense strand against b2GPI
ggcuuuacaucggaugcauca

SEQ ID NO: 2251 - RNA, 21 nt, Artificial Seqence
  Synthetic siRNA antisense strand against b2GPI
uggcuuuacaucggaugcauc

SEQ ID NO: 2252 - RNA, 21 nt, Artificial Seqence
  Synthetic siRNA antisense strand against b2GPI
auggcuuuacaucggaugcau

SEQ ID NO: 2253 - RNA, 21 nt, Artificial Seqence
  Synthetic siRNA antisense strand against b2GPI
cauggcuuuacaucggaugca

SEQ ID NO: 2254 - RNA, 21 nt, Artificial Seqence
  Synthetic siRNA antisense strand against b2GPI
gcauggcuuuacaucggaugc

SEQ ID NO: 2255 - RNA, 21 nt, Artificial Seqence
  Synthetic siRNA antisense strand against b2GPI
agcauggcuuuacaucggaug

SEQ ID NO: 2256 - RNA, 21 nt, Artificial Seqence
  Synthetic siRNA antisense strand against b2GPI
uagcauggcuuuacaucggau

SEQ ID NO: 2257 - RNA, 21 nt, Artificial Seqence
  Synthetic siRNA antisense strand against b2GPI
uuagcauggcuuuacaucgga

SEQ ID NO: 2258 - RNA, 21 nt, Artificial Seqence
  Synthetic siRNA antisense strand against b2GPI
cuuagcauggcuuuacaucgg

SEQ ID NO: 2259 - RNA, 21 nt, Artificial Seqence
  Synthetic siRNA antisense strand against b2GPI
ccuuagcauggcuuuacaucg

SEQ ID NO: 2260 - RNA, 21 nt, Artificial Seqence
  Synthetic siRNA antisense strand against b2GPI
accuuagcauggcuuuacauc

SEQ ID NO: 2261 - RNA, 21 nt, Artificial Seqence
  Synthetic siRNA antisense strand against b2GPI
caccuuagcauggcuuuacau

SEQ ID NO: 2262 - RNA, 21 nt, Artificial Seqence
  Synthetic siRNA antisense strand against b2GPI
ccaccuuagcauggcuuuaca

SEQ ID NO: 2263 - RNA, 21 nt, Artificial Seqence
  Synthetic siRNA antisense strand against b2GPI
accaccuuagcauggcuuuac

SEQ ID NO: 2264 - RNA, 21 nt, Artificial Seqence
  Synthetic siRNA antisense strand against b2GPI
aaccaccuuagcauggcuuua

SEQ ID NO: 2265 - RNA, 21 nt, Artificial Seqence
  Synthetic siRNA antisense strand against b2GPI
aaaccaccuuagcauggcuuu

SEQ ID NO: 2266 - RNA, 21 nt, Artificial Seqence
  Synthetic siRNA antisense strand against b2GPI
aaaaccaccuuagcauggcuu

SEQ ID NO: 2267 - RNA, 21 nt, Artificial Seqence
  Synthetic siRNA antisense strand against b2GPI
gaaaaccaccuuagcauggcu

SEQ ID NO: 2268 - RNA, 21 nt, Artificial Seqence
  Synthetic siRNA antisense strand against b2GPI
ugaaaaccaccuuagcauggc

SEQ ID NO: 2269 - RNA, 21 nt, Artificial Seqence
  Synthetic siRNA antisense strand against b2GPI
cugaaaaccaccuuagcaugg

SEQ ID NO: 2270 - RNA, 21 nt, Artificial Seqence
  Synthetic siRNA antisense strand against b2GPI
ucugaaaaccaccuuagcaug

SEQ ID NO: 2271 - RNA, 21 nt, Artificial Seqence
  Synthetic siRNA antisense strand against b2GPI
aucugaaaaccaccuuagcau

SEQ ID NO: 2272 - RNA, 21 nt, Artificial Seqence
  Synthetic siRNA antisense strand against b2GPI
aaucugaaaaccaccuuagca

SEQ ID NO: 2273 - RNA, 21 nt, Artificial Seqence
  Synthetic siRNA antisense strand against b2GPI
gaaucugaaaaccaccuuagc

SEQ ID NO: 2274 - RNA, 21 nt, Artificial Seqence
  Synthetic siRNA antisense strand against b2GPI
ggaaucugaaaaccaccuuag

SEQ ID NO: 2275 - RNA, 21 nt, Artificial Seqence
  Synthetic siRNA antisense strand against b2GPI
uggaaucugaaaaccaccuua

SEQ ID NO: 2276 - RNA, 21 nt, Artificial Seqence
  Synthetic siRNA antisense strand against b2GPI
guggaaucugaaaaccaccuu

SEQ ID NO: 2277 - RNA, 21 nt, Artificial Seqence
  Synthetic siRNA antisense strand against b2GPI
uguggaaucugaaaaccaccu

SEQ ID NO: 2278 - RNA, 21 nt, Artificial Seqence
  Synthetic siRNA antisense strand against b2GPI
guguggaaucugaaaaccacc

SEQ ID NO: 2279 - RNA, 21 nt, Artificial Seqence
  Synthetic siRNA antisense strand against b2GPI
uguguggaaucugaaaaccac

SEQ ID NO: 2280 - RNA, 21 nt, Artificial Seqence
  Synthetic siRNA antisense strand against b2GPI
uuguguggaaucugaaaacca

SEQ ID NO: 2281 - RNA, 21 nt, Artificial Seqence
  Synthetic siRNA antisense strand against b2GPI
uuuguguggaaucugaaaacc

SEQ ID NO: 2282 - RNA, 21 nt, Artificial Seqence
  Synthetic siRNA antisense strand against b2GPI
uuuuguguggaaucugaaaac

SEQ ID NO: 2283 - RNA, 21 nt, Artificial Seqence
  Synthetic siRNA antisense strand against b2GPI
auuuuguguggaaucugaaaa

SEQ ID NO: 2284 - RNA, 21 nt, Artificial Seqence
  Synthetic siRNA antisense strand against b2GPI
cauuuuguguggaaucugaaa

SEQ ID NO: 2285 - RNA, 21 nt, Artificial Seqence
  Synthetic siRNA antisense strand against b2GPI
acauuuuguguggaaucugaa

SEQ ID NO: 2286 - RNA, 21 nt, Artificial Seqence
  Synthetic siRNA antisense strand against b2GPI
gacauuuuguguggaaucuga

SEQ ID NO: 2287 - RNA, 21 nt, Artificial Seqence
  Synthetic siRNA antisense strand against b2GPI
ugacauuuuguguggaaucug

SEQ ID NO: 2288 - RNA, 21 nt, Artificial Seqence
  Synthetic siRNA antisense strand against b2GPI
gugacauuuuguguggaaucu

SEQ ID NO: 2289 - RNA, 21 nt, Artificial Seqence
  Synthetic siRNA antisense strand against b2GPI
ugugacauuuuguguggaauc

SEQ ID NO: 2290 - RNA, 21 nt, Artificial Seqence
  Synthetic siRNA antisense strand against b2GPI
gugugacauuuuguguggaau

SEQ ID NO: 2291 - RNA, 21 nt, Artificial Seqence
  Synthetic siRNA antisense strand against b2GPI
agugugacauuuuguguggaa

SEQ ID NO: 2292 - RNA, 21 nt, Artificial Seqence
  Synthetic siRNA antisense strand against b2GPI
aagugugacauuuugugugga

SEQ ID NO: 2293 - RNA, 21 nt, Artificial Seqence
  Synthetic siRNA antisense strand against b2GPI
caagugugacauuuugugugg

SEQ ID NO: 2294 - RNA, 21 nt, Artificial Seqence
  Synthetic siRNA antisense strand against b2GPI
acaagugugacauuuugugug

SEQ ID NO: 2295 - RNA, 21 nt, Artificial Seqence
  Synthetic siRNA antisense strand against b2GPI
aacaagugugacauuuugugu

SEQ ID NO: 2296 - RNA, 21 nt, Artificial Seqence
  Synthetic siRNA antisense strand against b2GPI
aaacaagugugacauuuugug

SEQ ID NO: 2297 - RNA, 21 nt, Artificial Seqence
  Synthetic siRNA antisense strand against b2GPI
gaaacaagugugacauuuugu

SEQ ID NO: 2298 - RNA, 21 nt, Artificial Seqence
  Synthetic siRNA antisense strand against b2GPI
agaaacaagugugacauuuug

SEQ ID NO: 2299 - RNA, 21 nt, Artificial Seqence
  Synthetic siRNA antisense strand against b2GPI
aagaaacaagugugacauuuu

SEQ ID NO: 2300 - RNA, 21 nt, Artificial Seqence
  Synthetic siRNA antisense strand against b2GPI
caagaaacaagugugacauuu

SEQ ID NO: 2301 - RNA, 21 nt, Artificial Seqence
  Synthetic siRNA antisense strand against b2GPI
acaagaaacaagugugacauu

SEQ ID NO: 2302 - RNA, 21 nt, Artificial Seqence
  Synthetic siRNA antisense strand against b2GPI
aacaagaaacaagugugacau

SEQ ID NO: 2303 - RNA, 21 nt, Artificial Seqence
  Synthetic siRNA antisense strand against b2GPI
gaacaagaaacaagugugaca

SEQ ID NO: 2304 - RNA, 21 nt, Artificial Seqence
  Synthetic siRNA antisense strand against b2GPI
ugaacaagaaacaagugugac

SEQ ID NO: 2305 - RNA, 21 nt, Artificial Seqence
  Synthetic siRNA antisense strand against b2GPI
augaacaagaaacaaguguga

SEQ ID NO: 2306 - RNA, 21 nt, Artificial Seqence
  Synthetic siRNA antisense strand against b2GPI
gaugaacaagaaacaagugug

SEQ ID NO: 2307 - RNA, 21 nt, Artificial Seqence
  Synthetic siRNA antisense strand against b2GPI
ggaugaacaagaaacaagugu

SEQ ID NO: 2308 - RNA, 21 nt, Artificial Seqence
  Synthetic siRNA antisense strand against b2GPI
uggaugaacaagaaacaagug

SEQ ID NO: 2309 - RNA, 21 nt, Artificial Seqence
  Synthetic siRNA antisense strand against b2GPI
uuggaugaacaagaaacaagu

SEQ ID NO: 2310 - RNA, 21 nt, Artificial Seqence
  Synthetic siRNA antisense strand against b2GPI
cuuggaugaacaagaaacaag

SEQ ID NO: 2311 - RNA, 21 nt, Artificial Seqence
  Synthetic siRNA antisense strand against b2GPI
ccuuggaugaacaagaaacaa

SEQ ID NO: 2312 - RNA, 21 nt, Artificial Seqence
  Synthetic siRNA antisense strand against b2GPI
uccuuggaugaacaagaaaca

SEQ ID NO: 2313 - RNA, 21 nt, Artificial Seqence
  Synthetic siRNA antisense strand against b2GPI
uuccuuggaugaacaagaaac

SEQ ID NO: 2314 - RNA, 21 nt, Artificial Seqence
  Synthetic siRNA antisense strand against b2GPI
guuccuuggaugaacaagaaa

SEQ ID NO: 2315 - RNA, 21 nt, Artificial Seqence
  Synthetic siRNA antisense strand against b2GPI
gguuccuuggaugaacaagaa

SEQ ID NO: 2316 - RNA, 21 nt, Artificial Seqence
  Synthetic siRNA antisense strand against b2GPI
agguuccuuggaugaacaaga

SEQ ID NO: 2317 - RNA, 21 nt, Artificial Seqence
  Synthetic siRNA antisense strand against b2GPI
uagguuccuuggaugaacaag

SEQ ID NO: 2318 - RNA, 21 nt, Artificial Seqence
  Synthetic siRNA antisense strand against b2GPI
uuagguuccuuggaugaacaa

SEQ ID NO: 2319 - RNA, 21 nt, Artificial Seqence
  Synthetic siRNA antisense strand against b2GPI
auuagguuccuuggaugaaca

SEQ ID NO: 2320 - RNA, 21 nt, Artificial Seqence
  Synthetic siRNA antisense strand against b2GPI
aauuagguuccuuggaugaac

SEQ ID NO: 2321 - RNA, 21 nt, Artificial Seqence
  Synthetic siRNA antisense strand against b2GPI
caauuagguuccuuggaugaa

SEQ ID NO: 2322 - RNA, 21 nt, Artificial Seqence
  Synthetic siRNA antisense strand against b2GPI
ucaauuagguuccuuggauga

SEQ ID NO: 2323 - RNA, 21 nt, Artificial Seqence
  Synthetic siRNA antisense strand against b2GPI
uucaauuagguuccuuggaug

SEQ ID NO: 2324 - RNA, 21 nt, Artificial Seqence
  Synthetic siRNA antisense strand against b2GPI
uuucaauuagguuccuuggau

SEQ ID NO: 2325 - RNA, 21 nt, Artificial Seqence
  Synthetic siRNA antisense strand against b2GPI
auuucaauuagguuccuugga

SEQ ID NO: 2326 - RNA, 21 nt, Artificial Seqence
  Synthetic siRNA antisense strand against b2GPI
aauuucaauuagguuccuugg

SEQ ID NO: 2327 - RNA, 21 nt, Artificial Seqence
  Synthetic siRNA antisense strand against b2GPI
aaauuucaauuagguuccuug

SEQ ID NO: 2328 - RNA, 21 nt, Artificial Seqence
  Synthetic siRNA antisense strand against b2GPI
uaaauuucaauuagguuccuu

SEQ ID NO: 2329 - RNA, 21 nt, Artificial Seqence
  Synthetic siRNA antisense strand against b2GPI
uuaaauuucaauuagguuccu

SEQ ID NO: 2330 - RNA, 21 nt, Artificial Seqence
  Synthetic siRNA antisense strand against b2GPI
uuuaaauuucaauuagguucc

SEQ ID NO: 2331 - RNA, 21 nt, Artificial Seqence
  Synthetic siRNA antisense strand against b2GPI
uuuuaaauuucaauuagguuc

SEQ ID NO: 2332 - RNA, 21 nt, Artificial Seqence
  Synthetic siRNA antisense strand against b2GPI
uuuuuaaauuucaauuagguu

SEQ ID NO: 2333 - RNA, 21 nt, Artificial Seqence
  Synthetic siRNA antisense strand against b2GPI
auuuuuaaauuucaauuaggu

SEQ ID NO: 2334 - RNA, 21 nt, Artificial Seqence
  Synthetic siRNA antisense strand against b2GPI
uauuuuuaaauuucaauuagg

SEQ ID NO: 2335 - RNA, 21 nt, Artificial Seqence
  Synthetic siRNA antisense strand against b2GPI
uuauuuuuaaauuucaauuag

SEQ ID NO: 2336 - RNA, 21 nt, Artificial Seqence
  Synthetic siRNA antisense strand against b2GPI
uuuauuuuuaaauuucaauua

SEQ ID NO: 2337 - RNA, 21 nt, Artificial Seqence
  Synthetic siRNA antisense strand against b2GPI
cuuuauuuuuaaauuucaauu

SEQ ID NO: 2338 - RNA, 21 nt, Artificial Seqence
  Synthetic siRNA antisense strand against b2GPI
gcuuuauuuuuaaauuucaau

SEQ ID NO: 2339 - RNA, 21 nt, Artificial Seqence
  Synthetic siRNA antisense strand against b2GPI
agcuuuauuuuuaaauuucaa

SEQ ID NO: 2340 - RNA, 21 nt, Artificial Seqence
  Synthetic siRNA antisense strand against b2GPI
uagcuuuauuuuuaaauuuca

SEQ ID NO: 2341 - RNA, 21 nt, Artificial Seqence
  Synthetic siRNA antisense strand against b2GPI
guagcuuuauuuuuaaauuuc

SEQ ID NO: 2342 - RNA, 21 nt, Artificial Seqence
  Synthetic siRNA antisense strand against b2GPI
aguagcuuuauuuuuaaauuu

SEQ ID NO: 2343 - RNA, 21 nt, Artificial Seqence
  Synthetic siRNA antisense strand against b2GPI
caguagcuuuauuuuuaaauu

SEQ ID NO: 2344 - RNA, 21 nt, Artificial Seqence
  Synthetic siRNA antisense strand against b2GPI
ucaguagcuuuauuuuuaaau

SEQ ID NO: 2345 - RNA, 21 nt, Artificial Seqence
  Synthetic siRNA antisense strand against b2GPI
uucaguagcuuuauuuuuaaa

SEQ ID NO: 2346 - RNA, 21 nt, Artificial Seqence
  Synthetic siRNA antisense strand against b2GPI
auucaguagcuuuauuuuuaa

SEQ ID NO: 2347 - RNA, 21 nt, Artificial Seqence
  Synthetic siRNA antisense strand against b2GPI
aauucaguagcuuuauuuuua

SEQ ID NO: 2348 - RNA, 21 nt, Artificial Seqence
  Synthetic siRNA antisense strand against b2GPI
aaauucaguagcuuuauuuuu

SEQ ID NO: 2349 - RNA, 21 nt, Artificial Seqence
  Synthetic siRNA antisense strand against b2GPI
uaaauucaguagcuuuauuuu

SEQ ID NO: 2350 - RNA, 21 nt, Artificial Seqence
  Synthetic siRNA antisense strand against b2GPI
auaaauucaguagcuuuauuu

SEQ ID NO: 2351 - RNA, 21 nt, Artificial Seqence
  Synthetic siRNA antisense strand against b2GPI
aauaaauucaguagcuuuauu

SEQ ID NO: 2352 - RNA, 21 nt, Artificial Seqence
  Synthetic siRNA antisense strand against b2GPI
caauaaauucaguagcuuuau

SEQ ID NO: 2353 - RNA, 21 nt, Artificial Seqence
  Synthetic siRNA antisense strand against b2GPI
gcaauaaauucaguagcuuua

SEQ ID NO: 2354 - RNA, 21 nt, Artificial Seqence
  Synthetic siRNA antisense strand against b2GPI
ggcaauaaauucaguagcuuu

SEQ ID NO: 2355 - RNA, 21 nt, Artificial Seqence
  Synthetic siRNA antisense strand against b2GPI
cggcaauaaauucaguagcuu

SEQ ID NO: 2356 - RNA, 21 nt, Artificial Seqence
  Synthetic siRNA antisense strand against b2GPI
gcggcaauaaauucaguagcu

SEQ ID NO: 2357 - RNA, 21 nt, Artificial Seqence
  Synthetic siRNA antisense strand against b2GPI
ugcggcaauaaauucaguagc

SEQ ID NO: 2358 - RNA, 21 nt, Artificial Seqence
  Synthetic siRNA antisense strand against b2GPI
gugcggcaauaaauucaguag

SEQ ID NO: 2359 - RNA, 21 nt, Artificial Seqence
  Synthetic siRNA antisense strand against b2GPI
ggugcggcaauaaauucagua

SEQ ID NO: 2360 - RNA, 21 nt, Artificial Seqence
  Synthetic siRNA antisense strand against b2GPI
gggugcggcaauaaauucagu

SEQ ID NO: 2361 - DNA, 19 bp, Homo sapiens
ctctgtctttttagcagac

SEQ ID NO: 2362 - DNA, 19 bp, Homo sapiens
tctgtctttttagcagacg

SEQ ID NO: 2363 - DNA, 19 bp, Homo sapiens
ctgtctttttagcagacga

SEQ ID NO: 2364 - DNA, 19 bp, Homo sapiens
tgtctttttagcagacgaa

SEQ ID NO: 2365 - DNA, 19 bp, Homo sapiens
gtctttttagcagacgaaa

SEQ ID NO: 2366 - DNA, 19 bp, Homo sapiens
tctttttagcagacgaaaa

SEQ ID NO: 2367 - DNA, 19 bp, Homo sapiens
ctttttagcagacgaaaac

SEQ ID NO: 2368 - DNA, 19 bp, Homo sapiens
tttttagcagacgaaaacc

SEQ ID NO: 2369 - DNA, 19 bp, Homo sapiens
ttttagcagacgaaaacca

SEQ ID NO: 2370 - DNA, 19 bp, Homo sapiens
tttagcagacgaaaaccac

SEQ ID NO: 2371 - DNA, 19 bp, Homo sapiens
ttagcagacgaaaaccact

SEQ ID NO: 2372 - DNA, 19 bp, Homo sapiens
tagcagacgaaaaccactt

SEQ ID NO: 2373 - DNA, 19 bp, Homo sapiens
agcagacgaaaaccacttt

SEQ ID NO: 2374 - DNA, 19 bp, Homo sapiens
gcagacgaaaaccactttg

SEQ ID NO: 2375 - DNA, 19 bp, Homo sapiens
cagacgaaaaccactttgg

SEQ ID NO: 2376 - DNA, 19 bp, Homo sapiens
agacgaaaaccactttggt

SEQ ID NO: 2377 - DNA, 19 bp, Homo sapiens
gacgaaaaccactttggta

SEQ ID NO: 2378 - DNA, 19 bp, Homo sapiens
acgaaaaccactttggtag

SEQ ID NO: 2379 - DNA, 19 bp, Homo sapiens
cgaaaaccactttggtagt

SEQ ID NO: 2380 - DNA, 19 bp, Homo sapiens
gaaaaccactttggtagtg

SEQ ID NO: 2381 - DNA, 19 bp, Homo sapiens
aaaaccactttggtagtgc

SEQ ID NO: 2382 - DNA, 19 bp, Homo sapiens
aaaccactttggtagtgcc

SEQ ID NO: 2383 - DNA, 19 bp, Homo sapiens
aaccactttggtagtgcca

SEQ ID NO: 2384 - DNA, 19 bp, Homo sapiens
accactttggtagtgccag

SEQ ID NO: 2385 - DNA, 19 bp, Homo sapiens
ccactttggtagtgccagt

SEQ ID NO: 2386 - DNA, 19 bp, Homo sapiens
cactttggtagtgccagtg

SEQ ID NO: 2387 - DNA, 19 bp, Homo sapiens
actttggtagtgccagtgt

SEQ ID NO: 2388 - DNA, 19 bp, Homo sapiens
ctttggtagtgccagtgtg

SEQ ID NO: 2389 - DNA, 19 bp, Homo sapiens
tttggtagtgccagtgtga

SEQ ID NO: 2390 - DNA, 19 bp, Homo sapiens
ttggtagtgccagtgtgac

SEQ ID NO: 2391 - DNA, 19 bp, Homo sapiens
tggtagtgccagtgtgact

SEQ ID NO: 2392 - DNA, 19 bp, Homo sapiens
ggtagtgccagtgtgactc

SEQ ID NO: 2393 - DNA, 19 bp, Homo sapiens
gtagtgccagtgtgactca

SEQ ID NO: 2394 - DNA, 19 bp, Homo sapiens
tagtgccagtgtgactcat

SEQ ID NO: 2395 - DNA, 19 bp, Homo sapiens
agtgccagtgtgactcatc

SEQ ID NO: 2396 - DNA, 19 bp, Homo sapiens
gtgccagtgtgactcatcc

SEQ ID NO: 2397 - DNA, 19 bp, Homo sapiens
tgccagtgtgactcatcca

SEQ ID NO: 2398 - DNA, 19 bp, Homo sapiens
gccagtgtgactcatccac

SEQ ID NO: 2399 - DNA, 19 bp, Homo sapiens
ccagtgtgactcatccaca

SEQ ID NO: 2400 - DNA, 19 bp, Homo sapiens
cagtgtgactcatccacaa

SEQ ID NO: 2401 - DNA, 19 bp, Homo sapiens
agtgtgactcatccacaat

SEQ ID NO: 2402 - DNA, 19 bp, Homo sapiens
gtgtgactcatccacaatg

SEQ ID NO: 2403 - DNA, 19 bp, Homo sapiens
tgtgactcatccacaatga

SEQ ID NO: 2404 - DNA, 19 bp, Homo sapiens
gtgactcatccacaatgat

SEQ ID NO: 2405 - DNA, 19 bp, Homo sapiens
tgactcatccacaatgatt

SEQ ID NO: 2406 - DNA, 19 bp, Homo sapiens
gactcatccacaatgattt

SEQ ID NO: 2407 - DNA, 19 bp, Homo sapiens
actcatccacaatgatttc

SEQ ID NO: 2408 - DNA, 19 bp, Homo sapiens
ctcatccacaatgatttct

SEQ ID NO: 2409 - DNA, 19 bp, Homo sapiens
tcatccacaatgatttctc

SEQ ID NO: 2410 - DNA, 19 bp, Homo sapiens
catccacaatgatttctcc

SEQ ID NO: 2411 - DNA, 19 bp, Homo sapiens
atccacaatgatttctcca

SEQ ID NO: 2412 - DNA, 19 bp, Homo sapiens
tccacaatgatttctccag

SEQ ID NO: 2413 - DNA, 19 bp, Homo sapiens
ccacaatgatttctccagt

SEQ ID NO: 2414 - DNA, 19 bp, Homo sapiens
cacaatgatttctccagtg

SEQ ID NO: 2415 - DNA, 19 bp, Homo sapiens
acaatgatttctccagtgc

SEQ ID NO: 2416 - DNA, 19 bp, Homo sapiens
caatgatttctccagtgct

SEQ ID NO: 2417 - DNA, 19 bp, Homo sapiens
aatgatttctccagtgctc

SEQ ID NO: 2418 - DNA, 19 bp, Homo sapiens
atgatttctccagtgctca

SEQ ID NO: 2419 - DNA, 19 bp, Homo sapiens
tgatttctccagtgctcat

SEQ ID NO: 2420 - DNA, 19 bp, Homo sapiens
gatttctccagtgctcatc

SEQ ID NO: 2421 - DNA, 19 bp, Homo sapiens
atttctccagtgctcatct

SEQ ID NO: 2422 - DNA, 19 bp, Homo sapiens
tttctccagtgctcatctt

SEQ ID NO: 2423 - DNA, 19 bp, Homo sapiens
ttctccagtgctcatcttg

SEQ ID NO: 2424 - DNA, 19 bp, Homo sapiens
tctccagtgctcatcttgt

SEQ ID NO: 2425 - DNA, 19 bp, Homo sapiens
ctccagtgctcatcttgtt

SEQ ID NO: 2426 - DNA, 19 bp, Homo sapiens
tccagtgctcatcttgttc

SEQ ID NO: 2427 - DNA, 19 bp, Homo sapiens
ccagtgctcatcttgttct

SEQ ID NO: 2428 - DNA, 19 bp, Homo sapiens
cagtgctcatcttgttctc

SEQ ID NO: 2429 - DNA, 19 bp, Homo sapiens
agtgctcatcttgttctcg

SEQ ID NO: 2430 - DNA, 19 bp, Homo sapiens
gtgctcatcttgttctcga

SEQ ID NO: 2431 - DNA, 19 bp, Homo sapiens
tgctcatcttgttctcgag

SEQ ID NO: 2432 - DNA, 19 bp, Homo sapiens
gctcatcttgttctcgagt

SEQ ID NO: 2433 - DNA, 19 bp, Homo sapiens
ctcatcttgttctcgagtt

SEQ ID NO: 2434 - DNA, 19 bp, Homo sapiens
tcatcttgttctcgagttt

SEQ ID NO: 2435 - DNA, 19 bp, Homo sapiens
catcttgttctcgagtttt

SEQ ID NO: 2436 - DNA, 19 bp, Homo sapiens
atcttgttctcgagttttc

SEQ ID NO: 2437 - DNA, 19 bp, Homo sapiens
tcttgttctcgagttttct

SEQ ID NO: 2438 - DNA, 19 bp, Homo sapiens
cttgttctcgagttttctc

SEQ ID NO: 2439 - DNA, 19 bp, Homo sapiens
ttgttctcgagttttctct

SEQ ID NO: 2440 - DNA, 19 bp, Homo sapiens
tgttctcgagttttctctg

SEQ ID NO: 2441 - DNA, 19 bp, Homo sapiens
gttctcgagttttctctgc

SEQ ID NO: 2442 - DNA, 19 bp, Homo sapiens
ttctcgagttttctctgcc

SEQ ID NO: 2443 - DNA, 19 bp, Homo sapiens
tctcgagttttctctgcca

SEQ ID NO: 2444 - DNA, 19 bp, Homo sapiens
ctcgagttttctctgccat

SEQ ID NO: 2445 - DNA, 19 bp, Homo sapiens
tcgagttttctctgccatg

SEQ ID NO: 2446 - DNA, 19 bp, Homo sapiens
cgagttttctctgccatgt

SEQ ID NO: 2447 - DNA, 19 bp, Homo sapiens
gagttttctctgccatgtt

SEQ ID NO: 2448 - DNA, 19 bp, Homo sapiens
agttttctctgccatgttg

SEQ ID NO: 2449 - DNA, 19 bp, Homo sapiens
gttttctctgccatgttgc

SEQ ID NO: 2450 - DNA, 19 bp, Homo sapiens
ttttctctgccatgttgct

SEQ ID NO: 2451 - DNA, 19 bp, Homo sapiens
tttctctgccatgttgcta

SEQ ID NO: 2452 - DNA, 19 bp, Homo sapiens
ttctctgccatgttgctat

SEQ ID NO: 2453 - DNA, 19 bp, Homo sapiens
tctctgccatgttgctatt

SEQ ID NO: 2454 - DNA, 19 bp, Homo sapiens
ctctgccatgttgctattg

SEQ ID NO: 2455 - DNA, 19 bp, Homo sapiens
tctgccatgttgctattgc

SEQ ID NO: 2456 - DNA, 19 bp, Homo sapiens
ctgccatgttgctattgca

SEQ ID NO: 2457 - DNA, 19 bp, Homo sapiens
tgccatgttgctattgcag

SEQ ID NO: 2458 - DNA, 19 bp, Homo sapiens
gccatgttgctattgcagg

SEQ ID NO: 2459 - DNA, 19 bp, Homo sapiens
ccatgttgctattgcagga

SEQ ID NO: 2460 - DNA, 19 bp, Homo sapiens
catgttgctattgcaggac

SEQ ID NO: 2461 - DNA, 19 bp, Homo sapiens
atgttgctattgcaggacg

SEQ ID NO: 2462 - DNA, 19 bp, Homo sapiens
tgttgctattgcaggacgg

SEQ ID NO: 2463 - DNA, 19 bp, Homo sapiens
gttgctattgcaggacgga

SEQ ID NO: 2464 - DNA, 19 bp, Homo sapiens
ttgctattgcaggacggac

SEQ ID NO: 2465 - DNA, 19 bp, Homo sapiens
tgctattgcaggacggacc

SEQ ID NO: 2466 - DNA, 19 bp, Homo sapiens
gctattgcaggacggacct

SEQ ID NO: 2467 - DNA, 19 bp, Homo sapiens
ctattgcaggacggacctg

SEQ ID NO: 2468 - DNA, 19 bp, Homo sapiens
tattgcaggacggacctgt

SEQ ID NO: 2469 - DNA, 19 bp, Homo sapiens
attgcaggacggacctgtc

SEQ ID NO: 2470 - DNA, 19 bp, Homo sapiens
ttgcaggacggacctgtcc

SEQ ID NO: 2471 - DNA, 19 bp, Homo sapiens
tgcaggacggacctgtccc

SEQ ID NO: 2472 - DNA, 19 bp, Homo sapiens
gcaggacggacctgtccca

SEQ ID NO: 2473 - DNA, 19 bp, Homo sapiens
caggacggacctgtcccaa

SEQ ID NO: 2474 - DNA, 19 bp, Homo sapiens
aggacggacctgtcccaag

SEQ ID NO: 2475 - DNA, 19 bp, Homo sapiens
ggacggacctgtcccaagc

SEQ ID NO: 2476 - DNA, 19 bp, Homo sapiens
gacggacctgtcccaagcc

SEQ ID NO: 2477 - DNA, 19 bp, Homo sapiens
acggacctgtcccaagcca

SEQ ID NO: 2478 - DNA, 19 bp, Homo sapiens
cggacctgtcccaagccag

SEQ ID NO: 2479 - DNA, 19 bp, Homo sapiens
ggacctgtcccaagccaga

SEQ ID NO: 2480 - DNA, 19 bp, Homo sapiens
gacctgtcccaagccagat

SEQ ID NO: 2481 - DNA, 19 bp, Homo sapiens
acctgtcccaagccagatg

SEQ ID NO: 2482 - DNA, 19 bp, Homo sapiens
cctgtcccaagccagatga

SEQ ID NO: 2483 - DNA, 19 bp, Homo sapiens
ctgtcccaagccagatgat

SEQ ID NO: 2484 - DNA, 19 bp, Homo sapiens
tgtcccaagccagatgatt

SEQ ID NO: 2485 - DNA, 19 bp, Homo sapiens
gtcccaagccagatgattt

SEQ ID NO: 2486 - DNA, 19 bp, Homo sapiens
tcccaagccagatgattta

SEQ ID NO: 2487 - DNA, 19 bp, Homo sapiens
cccaagccagatgatttac

SEQ ID NO: 2488 - DNA, 19 bp, Homo sapiens
ccaagccagatgatttacc

SEQ ID NO: 2489 - DNA, 19 bp, Homo sapiens
caagccagatgatttacca

SEQ ID NO: 2490 - DNA, 19 bp, Homo sapiens
aagccagatgatttaccat

SEQ ID NO: 2491 - DNA, 19 bp, Homo sapiens
agccagatgatttaccatt

SEQ ID NO: 2492 - DNA, 19 bp, Homo sapiens
gccagatgatttaccattt

SEQ ID NO: 2493 - DNA, 19 bp, Homo sapiens
ccagatgatttaccatttt

SEQ ID NO: 2494 - DNA, 19 bp, Homo sapiens
cagatgatttaccattttc

SEQ ID NO: 2495 - DNA, 19 bp, Homo sapiens
agatgatttaccattttcc

SEQ ID NO: 2496 - DNA, 19 bp, Homo sapiens
gatgatttaccattttcca

SEQ ID NO: 2497 - DNA, 19 bp, Homo sapiens
atgatttaccattttccac

SEQ ID NO: 2498 - DNA, 19 bp, Homo sapiens
tgatttaccattttccaca

SEQ ID NO: 2499 - DNA, 19 bp, Homo sapiens
gatttaccattttccacag

SEQ ID NO: 2500 - DNA, 19 bp, Homo sapiens
atttaccattttccacagt

SEQ ID NO: 2501 - DNA, 19 bp, Homo sapiens
tttaccattttccacagtg

SEQ ID NO: 2502 - DNA, 19 bp, Homo sapiens
ttaccattttccacagtgg

SEQ ID NO: 2503 - DNA, 19 bp, Homo sapiens
taccattttccacagtggt

SEQ ID NO: 2504 - DNA, 19 bp, Homo sapiens
accattttccacagtggtc

SEQ ID NO: 2505 - DNA, 19 bp, Homo sapiens
ccattttccacagtggtcc

SEQ ID NO: 2506 - DNA, 19 bp, Homo sapiens
cattttccacagtggtccc

SEQ ID NO: 2507 - DNA, 19 bp, Homo sapiens
attttccacagtggtcccg

SEQ ID NO: 2508 - DNA, 19 bp, Homo sapiens
ttttccacagtggtcccgt

SEQ ID NO: 2509 - DNA, 19 bp, Homo sapiens
tttccacagtggtcccgtt

SEQ ID NO: 2510 - DNA, 19 bp, Homo sapiens
ttccacagtggtcccgtta

SEQ ID NO: 2511 - DNA, 19 bp, Homo sapiens
tccacagtggtcccgttaa

SEQ ID NO: 2512 - DNA, 19 bp, Homo sapiens
ccacagtggtcccgttaaa

SEQ ID NO: 2513 - DNA, 19 bp, Homo sapiens
cacagtggtcccgttaaaa

SEQ ID NO: 2514 - DNA, 19 bp, Homo sapiens
acagtggtcccgttaaaaa

SEQ ID NO: 2515 - DNA, 19 bp, Homo sapiens
cagtggtcccgttaaaaac

SEQ ID NO: 2516 - DNA, 19 bp, Homo sapiens
agtggtcccgttaaaaaca

SEQ ID NO: 2517 - DNA, 19 bp, Homo sapiens
gtggtcccgttaaaaacat

SEQ ID NO: 2518 - DNA, 19 bp, Homo sapiens
tggtcccgttaaaaacatt

SEQ ID NO: 2519 - DNA, 19 bp, Homo sapiens
ggtcccgttaaaaacattc

SEQ ID NO: 2520 - DNA, 19 bp, Homo sapiens
gtcccgttaaaaacattct

SEQ ID NO: 2521 - DNA, 19 bp, Homo sapiens
tcccgttaaaaacattcta

SEQ ID NO: 2522 - DNA, 19 bp, Homo sapiens
cccgttaaaaacattctat

SEQ ID NO: 2523 - DNA, 19 bp, Homo sapiens
ccgttaaaaacattctatg

SEQ ID NO: 2524 - DNA, 19 bp, Homo sapiens
cgttaaaaacattctatga

SEQ ID NO: 2525 - DNA, 19 bp, Homo sapiens
gttaaaaacattctatgag

SEQ ID NO: 2526 - DNA, 19 bp, Homo sapiens
ttaaaaacattctatgagc

SEQ ID NO: 2527 - DNA, 19 bp, Homo sapiens
taaaaacattctatgagcc

SEQ ID NO: 2528 - DNA, 19 bp, Homo sapiens
aaaaacattctatgagcca

SEQ ID NO: 2529 - DNA, 19 bp, Homo sapiens
aaaacattctatgagccag

SEQ ID NO: 2530 - DNA, 19 bp, Homo sapiens
aaacattctatgagccagg

SEQ ID NO: 2531 - DNA, 19 bp, Homo sapiens
aacattctatgagccagga

SEQ ID NO: 2532 - DNA, 19 bp, Homo sapiens
acattctatgagccaggag

SEQ ID NO: 2533 - DNA, 19 bp, Homo sapiens
cattctatgagccaggaga

SEQ ID NO: 2534 - DNA, 19 bp, Homo sapiens
attctatgagccaggagaa

SEQ ID NO: 2535 - DNA, 19 bp, Homo sapiens
ttctatgagccaggagaag

SEQ ID NO: 2536 - DNA, 19 bp, Homo sapiens
tctatgagccaggagaaga

SEQ ID NO: 2537 - DNA, 19 bp, Homo sapiens
ctatgagccaggagaagag

SEQ ID NO: 2538 - DNA, 19 bp, Homo sapiens
tatgagccaggagaagaga

SEQ ID NO: 2539 - DNA, 19 bp, Homo sapiens
atgagccaggagaagagat

SEQ ID NO: 2540 - DNA, 19 bp, Homo sapiens
tgagccaggagaagagatt

SEQ ID NO: 2541 - DNA, 19 bp, Homo sapiens
gagccaggagaagagatta

SEQ ID NO: 2542 - DNA, 19 bp, Homo sapiens
agccaggagaagagattac

SEQ ID NO: 2543 - DNA, 19 bp, Homo sapiens
gccaggagaagagattacg

SEQ ID NO: 2544 - DNA, 19 bp, Homo sapiens
ccaggagaagagattacgt

SEQ ID NO: 2545 - DNA, 19 bp, Homo sapiens
caggagaagagattacgta

SEQ ID NO: 2546 - DNA, 19 bp, Homo sapiens
aggagaagagattacgtat

SEQ ID NO: 2547 - DNA, 19 bp, Homo sapiens
ggagaagagattacgtatt

SEQ ID NO: 2548 - DNA, 19 bp, Homo sapiens
gagaagagattacgtattc

SEQ ID NO: 2549 - DNA, 19 bp, Homo sapiens
agaagagattacgtattcc

SEQ ID NO: 2550 - DNA, 19 bp, Homo sapiens
gaagagattacgtattcct

SEQ ID NO: 2551 - DNA, 19 bp, Homo sapiens
aagagattacgtattcctg

SEQ ID NO: 2552 - DNA, 19 bp, Homo sapiens
agagattacgtattcctgc

SEQ ID NO: 2553 - DNA, 19 bp, Homo sapiens
gagattacgtattcctgca

SEQ ID NO: 2554 - DNA, 19 bp, Homo sapiens
agattacgtattcctgcaa

SEQ ID NO: 2555 - DNA, 19 bp, Homo sapiens
gattacgtattcctgcaag

SEQ ID NO: 2556 - DNA, 19 bp, Homo sapiens
attacgtattcctgcaagc

SEQ ID NO: 2557 - DNA, 19 bp, Homo sapiens
ttacgtattcctgcaagcc

SEQ ID NO: 2558 - DNA, 19 bp, Homo sapiens
tacgtattcctgcaagccg

SEQ ID NO: 2559 - DNA, 19 bp, Homo sapiens
acgtattcctgcaagccgg

SEQ ID NO: 2560 - DNA, 19 bp, Homo sapiens
cgtattcctgcaagccggg

SEQ ID NO: 2561 - DNA, 19 bp, Homo sapiens
gtattcctgcaagccgggc

SEQ ID NO: 2562 - DNA, 19 bp, Homo sapiens
tattcctgcaagccgggct

SEQ ID NO: 2563 - DNA, 19 bp, Homo sapiens
attcctgcaagccgggcta

SEQ ID NO: 2564 - DNA, 19 bp, Homo sapiens
ttcctgcaagccgggctat

SEQ ID NO: 2565 - DNA, 19 bp, Homo sapiens
tcctgcaagccgggctatg

SEQ ID NO: 2566 - DNA, 19 bp, Homo sapiens
cctgcaagccgggctatgt

SEQ ID NO: 2567 - DNA, 19 bp, Homo sapiens
ctgcaagccgggctatgtg

SEQ ID NO: 2568 - DNA, 19 bp, Homo sapiens
tgcaagccgggctatgtgt

SEQ ID NO: 2569 - DNA, 19 bp, Homo sapiens
gcaagccgggctatgtgtc

SEQ ID NO: 2570 - DNA, 19 bp, Homo sapiens
caagccgggctatgtgtcc

SEQ ID NO: 2571 - DNA, 19 bp, Homo sapiens
aagccgggctatgtgtccc

SEQ ID NO: 2572 - DNA, 19 bp, Homo sapiens
agccgggctatgtgtcccg

SEQ ID NO: 2573 - DNA, 19 bp, Homo sapiens
gccgggctatgtgtcccga

SEQ ID NO: 2574 - DNA, 19 bp, Homo sapiens
ccgggctatgtgtcccgag

SEQ ID NO: 2575 - DNA, 19 bp, Homo sapiens
cgggctatgtgtcccgagg

SEQ ID NO: 2576 - DNA, 19 bp, Homo sapiens
gggctatgtgtcccgagga

SEQ ID NO: 2577 - DNA, 19 bp, Homo sapiens
ggctatgtgtcccgaggag

SEQ ID NO: 2578 - DNA, 19 bp, Homo sapiens
gctatgtgtcccgaggagg

SEQ ID NO: 2579 - DNA, 19 bp, Homo sapiens
ctatgtgtcccgaggaggg

SEQ ID NO: 2580 - DNA, 19 bp, Homo sapiens
tatgtgtcccgaggaggga

SEQ ID NO: 2581 - DNA, 19 bp, Homo sapiens
atgtgtcccgaggagggat

SEQ ID NO: 2582 - DNA, 19 bp, Homo sapiens
tgtgtcccgaggagggatg

SEQ ID NO: 2583 - DNA, 19 bp, Homo sapiens
gtgtcccgaggagggatga

SEQ ID NO: 2584 - DNA, 19 bp, Homo sapiens
tgtcccgaggagggatgag

SEQ ID NO: 2585 - DNA, 19 bp, Homo sapiens
gtcccgaggagggatgaga

SEQ ID NO: 2586 - DNA, 19 bp, Homo sapiens
tcccgaggagggatgagaa

SEQ ID NO: 2587 - DNA, 19 bp, Homo sapiens
cccgaggagggatgagaaa

SEQ ID NO: 2588 - DNA, 19 bp, Homo sapiens
ccgaggagggatgagaaag

SEQ ID NO: 2589 - DNA, 19 bp, Homo sapiens
cgaggagggatgagaaagt

SEQ ID NO: 2590 - DNA, 19 bp, Homo sapiens
gaggagggatgagaaagtt

SEQ ID NO: 2591 - DNA, 19 bp, Homo sapiens
aggagggatgagaaagttt

SEQ ID NO: 2592 - DNA, 19 bp, Homo sapiens
ggagggatgagaaagttta

SEQ ID NO: 2593 - DNA, 19 bp, Homo sapiens
gagggatgagaaagtttat

SEQ ID NO: 2594 - DNA, 19 bp, Homo sapiens
agggatgagaaagtttatc

SEQ ID NO: 2595 - DNA, 19 bp, Homo sapiens
gggatgagaaagtttatct

SEQ ID NO: 2596 - DNA, 19 bp, Homo sapiens
ggatgagaaagtttatctg

SEQ ID NO: 2597 - DNA, 19 bp, Homo sapiens
gatgagaaagtttatctgc

SEQ ID NO: 2598 - DNA, 19 bp, Homo sapiens
atgagaaagtttatctgcc

SEQ ID NO: 2599 - DNA, 19 bp, Homo sapiens
tgagaaagtttatctgccc

SEQ ID NO: 2600 - DNA, 19 bp, Homo sapiens
gagaaagtttatctgccct

SEQ ID NO: 2601 - DNA, 19 bp, Homo sapiens
agaaagtttatctgccctc

SEQ ID NO: 2602 - DNA, 19 bp, Homo sapiens
gaaagtttatctgccctct

SEQ ID NO: 2603 - DNA, 19 bp, Homo sapiens
aaagtttatctgccctctc

SEQ ID NO: 2604 - DNA, 19 bp, Homo sapiens
aagtttatctgccctctca

SEQ ID NO: 2605 - DNA, 19 bp, Homo sapiens
agtttatctgccctctcac

SEQ ID NO: 2606 - DNA, 19 bp, Homo sapiens
gtttatctgccctctcaca

SEQ ID NO: 2607 - DNA, 19 bp, Homo sapiens
tttatctgccctctcacag

SEQ ID NO: 2608 - DNA, 19 bp, Homo sapiens
ttatctgccctctcacagg

SEQ ID NO: 2609 - DNA, 19 bp, Homo sapiens
tatctgccctctcacagga

SEQ ID NO: 2610 - DNA, 19 bp, Homo sapiens
atctgccctctcacaggac

SEQ ID NO: 2611 - DNA, 19 bp, Homo sapiens
tctgccctctcacaggact

SEQ ID NO: 2612 - DNA, 19 bp, Homo sapiens
ctgccctctcacaggactg

SEQ ID NO: 2613 - DNA, 19 bp, Homo sapiens
tgccctctcacaggactgt

SEQ ID NO: 2614 - DNA, 19 bp, Homo sapiens
gccctctcacaggactgtg

SEQ ID NO: 2615 - DNA, 19 bp, Homo sapiens
ccctctcacaggactgtgg

SEQ ID NO: 2616 - DNA, 19 bp, Homo sapiens
cctctcacaggactgtggc

SEQ ID NO: 2617 - DNA, 19 bp, Homo sapiens
ctctcacaggactgtggcc

SEQ ID NO: 2618 - DNA, 19 bp, Homo sapiens
tctcacaggactgtggccc

SEQ ID NO: 2619 - DNA, 19 bp, Homo sapiens
ctcacaggactgtggccca

SEQ ID NO: 2620 - DNA, 19 bp, Homo sapiens
tcacaggactgtggcccat

SEQ ID NO: 2621 - DNA, 19 bp, Homo sapiens
cacaggactgtggcccatc

SEQ ID NO: 2622 - DNA, 19 bp, Homo sapiens
acaggactgtggcccatca

SEQ ID NO: 2623 - DNA, 19 bp, Homo sapiens
caggactgtggcccatcaa

SEQ ID NO: 2624 - DNA, 19 bp, Homo sapiens
aggactgtggcccatcaac

SEQ ID NO: 2625 - DNA, 19 bp, Homo sapiens
ggactgtggcccatcaaca

SEQ ID NO: 2626 - DNA, 19 bp, Homo sapiens
gactgtggcccatcaacac

SEQ ID NO: 2627 - DNA, 19 bp, Homo sapiens
actgtggcccatcaacact

SEQ ID NO: 2628 - DNA, 19 bp, Homo sapiens
ctgtggcccatcaacactc

SEQ ID NO: 2629 - DNA, 19 bp, Homo sapiens
tgtggcccatcaacactct

SEQ ID NO: 2630 - DNA, 19 bp, Homo sapiens
gtggcccatcaacactctg

SEQ ID NO: 2631 - DNA, 19 bp, Homo sapiens
tggcccatcaacactctga

SEQ ID NO: 2632 - DNA, 19 bp, Homo sapiens
ggcccatcaacactctgaa

SEQ ID NO: 2633 - DNA, 19 bp, Homo sapiens
gcccatcaacactctgaaa

SEQ ID NO: 2634 - DNA, 19 bp, Homo sapiens
cccatcaacactctgaaat

SEQ ID NO: 2635 - DNA, 19 bp, Homo sapiens
ccatcaacactctgaaatg

SEQ ID NO: 2636 - DNA, 19 bp, Homo sapiens
catcaacactctgaaatgt

SEQ ID NO: 2637 - DNA, 19 bp, Homo sapiens
atcaacactctgaaatgta

SEQ ID NO: 2638 - DNA, 19 bp, Homo sapiens
tcaacactctgaaatgtac

SEQ ID NO: 2639 - DNA, 19 bp, Homo sapiens
caacactctgaaatgtaca

SEQ ID NO: 2640 - DNA, 19 bp, Homo sapiens
aacactctgaaatgtacac

SEQ ID NO: 2641 - DNA, 19 bp, Homo sapiens
acactctgaaatgtacacc

SEQ ID NO: 2642 - DNA, 19 bp, Homo sapiens
cactctgaaatgtacaccc

SEQ ID NO: 2643 - DNA, 19 bp, Homo sapiens
actctgaaatgtacaccca

SEQ ID NO: 2644 - DNA, 19 bp, Homo sapiens
ctctgaaatgtacacccag

SEQ ID NO: 2645 - DNA, 19 bp, Homo sapiens
tctgaaatgtacacccaga

SEQ ID NO: 2646 - DNA, 19 bp, Homo sapiens
ctgaaatgtacacccagag

SEQ ID NO: 2647 - DNA, 19 bp, Homo sapiens
tgaaatgtacacccagagt

SEQ ID NO: 2648 - DNA, 19 bp, Homo sapiens
gaaatgtacacccagagta

SEQ ID NO: 2649 - DNA, 19 bp, Homo sapiens
aaatgtacacccagagtat

SEQ ID NO: 2650 - DNA, 19 bp, Homo sapiens
aatgtacacccagagtatg

SEQ ID NO: 2651 - DNA, 19 bp, Homo sapiens
atgtacacccagagtatgt

SEQ ID NO: 2652 - DNA, 19 bp, Homo sapiens
tgtacacccagagtatgtc

SEQ ID NO: 2653 - DNA, 19 bp, Homo sapiens
gtacacccagagtatgtcc

SEQ ID NO: 2654 - DNA, 19 bp, Homo sapiens
tacacccagagtatgtcct

SEQ ID NO: 2655 - DNA, 19 bp, Homo sapiens
acacccagagtatgtcctt

SEQ ID NO: 2656 - DNA, 19 bp, Homo sapiens
cacccagagtatgtccttt

SEQ ID NO: 2657 - DNA, 19 bp, Homo sapiens
acccagagtatgtcctttt

SEQ ID NO: 2658 - DNA, 19 bp, Homo sapiens
cccagagtatgtccttttg

SEQ ID NO: 2659 - DNA, 19 bp, Homo sapiens
ccagagtatgtccttttgc

SEQ ID NO: 2660 - DNA, 19 bp, Homo sapiens
cagagtatgtccttttgct

SEQ ID NO: 2661 - DNA, 19 bp, Homo sapiens
agagtatgtccttttgctg

SEQ ID NO: 2662 - DNA, 19 bp, Homo sapiens
gagtatgtccttttgctgg

SEQ ID NO: 2663 - DNA, 19 bp, Homo sapiens
agtatgtccttttgctgga

SEQ ID NO: 2664 - DNA, 19 bp, Homo sapiens
gtatgtccttttgctggaa

SEQ ID NO: 2665 - DNA, 19 bp, Homo sapiens
tatgtccttttgctggaat

SEQ ID NO: 2666 - DNA, 19 bp, Homo sapiens
atgtccttttgctggaatc

SEQ ID NO: 2667 - DNA, 19 bp, Homo sapiens
tgtccttttgctggaatct

SEQ ID NO: 2668 - DNA, 19 bp, Homo sapiens
gtccttttgctggaatctt

SEQ ID NO: 2669 - DNA, 19 bp, Homo sapiens
tccttttgctggaatctta

SEQ ID NO: 2670 - DNA, 19 bp, Homo sapiens
ccttttgctggaatcttag

SEQ ID NO: 2671 - DNA, 19 bp, Homo sapiens
cttttgctggaatcttaga

SEQ ID NO: 2672 - DNA, 19 bp, Homo sapiens
ttttgctggaatcttagaa

SEQ ID NO: 2673 - DNA, 19 bp, Homo sapiens
tttgctggaatcttagaaa

SEQ ID NO: 2674 - DNA, 19 bp, Homo sapiens
ttgctggaatcttagaaaa

SEQ ID NO: 2675 - DNA, 19 bp, Homo sapiens
tgctggaatcttagaaaat

SEQ ID NO: 2676 - DNA, 19 bp, Homo sapiens
gctggaatcttagaaaatg

SEQ ID NO: 2677 - DNA, 19 bp, Homo sapiens
ctggaatcttagaaaatgg

SEQ ID NO: 2678 - DNA, 19 bp, Homo sapiens
tggaatcttagaaaatgga

SEQ ID NO: 2679 - DNA, 19 bp, Homo sapiens
ggaatcttagaaaatggag

SEQ ID NO: 2680 - DNA, 19 bp, Homo sapiens
gaatcttagaaaatggagc

SEQ ID NO: 2681 - DNA, 19 bp, Homo sapiens
aatcttagaaaatggagcc

SEQ ID NO: 2682 - DNA, 19 bp, Homo sapiens
atcttagaaaatggagccg

SEQ ID NO: 2683 - DNA, 19 bp, Homo sapiens
tcttagaaaatggagccgt

SEQ ID NO: 2684 - DNA, 19 bp, Homo sapiens
cttagaaaatggagccgta

SEQ ID NO: 2685 - DNA, 19 bp, Homo sapiens
ttagaaaatggagccgtac

SEQ ID NO: 2686 - DNA, 19 bp, Homo sapiens
tagaaaatggagccgtacg

SEQ ID NO: 2687 - DNA, 19 bp, Homo sapiens
agaaaatggagccgtacgc

SEQ ID NO: 2688 - DNA, 19 bp, Homo sapiens
gaaaatggagccgtacgct

SEQ ID NO: 2689 - DNA, 19 bp, Homo sapiens
aaaatggagccgtacgcta

SEQ ID NO: 2690 - DNA, 19 bp, Homo sapiens
aaatggagccgtacgctat

SEQ ID NO: 2691 - DNA, 19 bp, Homo sapiens
aatggagccgtacgctata

SEQ ID NO: 2692 - DNA, 19 bp, Homo sapiens
atggagccgtacgctatac

SEQ ID NO: 2693 - DNA, 19 bp, Homo sapiens
tggagccgtacgctatacg

SEQ ID NO: 2694 - DNA, 19 bp, Homo sapiens
ggagccgtacgctatacga

SEQ ID NO: 2695 - DNA, 19 bp, Homo sapiens
gagccgtacgctatacgac

SEQ ID NO: 2696 - DNA, 19 bp, Homo sapiens
agccgtacgctatacgact

SEQ ID NO: 2697 - DNA, 19 bp, Homo sapiens
gccgtacgctatacgactt

SEQ ID NO: 2698 - DNA, 19 bp, Homo sapiens
ccgtacgctatacgacttt

SEQ ID NO: 2699 - DNA, 19 bp, Homo sapiens
cgtacgctatacgactttt

SEQ ID NO: 2700 - DNA, 19 bp, Homo sapiens
gtacgctatacgacttttg

SEQ ID NO: 2701 - DNA, 19 bp, Homo sapiens
tacgctatacgacttttga

SEQ ID NO: 2702 - DNA, 19 bp, Homo sapiens
acgctatacgacttttgaa

SEQ ID NO: 2703 - DNA, 19 bp, Homo sapiens
cgctatacgacttttgaat

SEQ ID NO: 2704 - DNA, 19 bp, Homo sapiens
gctatacgacttttgaata

SEQ ID NO: 2705 - DNA, 19 bp, Homo sapiens
ctatacgacttttgaatat

SEQ ID NO: 2706 - DNA, 19 bp, Homo sapiens
tatacgacttttgaatatc

SEQ ID NO: 2707 - DNA, 19 bp, Homo sapiens
atacgacttttgaatatcc

SEQ ID NO: 2708 - DNA, 19 bp, Homo sapiens
tacgacttttgaatatccc

SEQ ID NO: 2709 - DNA, 19 bp, Homo sapiens
acgacttttgaatatccca

SEQ ID NO: 2710 - DNA, 19 bp, Homo sapiens
cgacttttgaatatcccaa

SEQ ID NO: 2711 - DNA, 19 bp, Homo sapiens
gacttttgaatatcccaac

SEQ ID NO: 2712 - DNA, 19 bp, Homo sapiens
acttttgaatatcccaaca

SEQ ID NO: 2713 - DNA, 19 bp, Homo sapiens
cttttgaatatcccaacac

SEQ ID NO: 2714 - DNA, 19 bp, Homo sapiens
ttttgaatatcccaacacg

SEQ ID NO: 2715 - DNA, 19 bp, Homo sapiens
tttgaatatcccaacacga

SEQ ID NO: 2716 - DNA, 19 bp, Homo sapiens
ttgaatatcccaacacgat

SEQ ID NO: 2717 - DNA, 19 bp, Homo sapiens
tgaatatcccaacacgatc

SEQ ID NO: 2718 - DNA, 19 bp, Homo sapiens
gaatatcccaacacgatca

SEQ ID NO: 2719 - DNA, 19 bp, Homo sapiens
aatatcccaacacgatcag

SEQ ID NO: 2720 - DNA, 19 bp, Homo sapiens
atatcccaacacgatcagt

SEQ ID NO: 2721 - DNA, 19 bp, Homo sapiens
tatcccaacacgatcagtt

SEQ ID NO: 2722 - DNA, 19 bp, Homo sapiens
atcccaacacgatcagttt

SEQ ID NO: 2723 - DNA, 19 bp, Homo sapiens
tcccaacacgatcagtttt

SEQ ID NO: 2724 - DNA, 19 bp, Homo sapiens
cccaacacgatcagttttt

SEQ ID NO: 2725 - DNA, 19 bp, Homo sapiens
ccaacacgatcagtttttc

SEQ ID NO: 2726 - DNA, 19 bp, Homo sapiens
caacacgatcagtttttct

SEQ ID NO: 2727 - DNA, 19 bp, Homo sapiens
aacacgatcagtttttctt

SEQ ID NO: 2728 - DNA, 19 bp, Homo sapiens
acacgatcagtttttcttg

SEQ ID NO: 2729 - DNA, 19 bp, Homo sapiens
cacgatcagtttttcttgt

SEQ ID NO: 2730 - DNA, 19 bp, Homo sapiens
acgatcagtttttcttgta

SEQ ID NO: 2731 - DNA, 19 bp, Homo sapiens
cgatcagtttttcttgtaa

SEQ ID NO: 2732 - DNA, 19 bp, Homo sapiens
gatcagtttttcttgtaac

SEQ ID NO: 2733 - DNA, 19 bp, Homo sapiens
atcagtttttcttgtaaca

SEQ ID NO: 2734 - DNA, 19 bp, Homo sapiens
tcagtttttcttgtaacac

SEQ ID NO: 2735 - DNA, 19 bp, Homo sapiens
cagtttttcttgtaacact

SEQ ID NO: 2736 - DNA, 19 bp, Homo sapiens
agtttttcttgtaacactg

SEQ ID NO: 2737 - DNA, 19 bp, Homo sapiens
gtttttcttgtaacactgg

SEQ ID NO: 2738 - DNA, 19 bp, Homo sapiens
tttttcttgtaacactggg

SEQ ID NO: 2739 - DNA, 19 bp, Homo sapiens
ttttcttgtaacactgggt

SEQ ID NO: 2740 - DNA, 19 bp, Homo sapiens
tttcttgtaacactgggtt

SEQ ID NO: 2741 - DNA, 19 bp, Homo sapiens
ttcttgtaacactgggttt

SEQ ID NO: 2742 - DNA, 19 bp, Homo sapiens
tcttgtaacactgggtttt

SEQ ID NO: 2743 - DNA, 19 bp, Homo sapiens
cttgtaacactgggtttta

SEQ ID NO: 2744 - DNA, 19 bp, Homo sapiens
ttgtaacactgggttttat

SEQ ID NO: 2745 - DNA, 19 bp, Homo sapiens
tgtaacactgggttttatc

SEQ ID NO: 2746 - DNA, 19 bp, Homo sapiens
gtaacactgggttttatct

SEQ ID NO: 2747 - DNA, 19 bp, Homo sapiens
taacactgggttttatctg

SEQ ID NO: 2748 - DNA, 19 bp, Homo sapiens
aacactgggttttatctga

SEQ ID NO: 2749 - DNA, 19 bp, Homo sapiens
acactgggttttatctgaa

SEQ ID NO: 2750 - DNA, 19 bp, Homo sapiens
cactgggttttatctgaat

SEQ ID NO: 2751 - DNA, 19 bp, Homo sapiens
actgggttttatctgaatg

SEQ ID NO: 2752 - DNA, 19 bp, Homo sapiens
ctgggttttatctgaatgg

SEQ ID NO: 2753 - DNA, 19 bp, Homo sapiens
tgggttttatctgaatggc

SEQ ID NO: 2754 - DNA, 19 bp, Homo sapiens
gggttttatctgaatggcg

SEQ ID NO: 2755 - DNA, 19 bp, Homo sapiens
ggttttatctgaatggcgc

SEQ ID NO: 2756 - DNA, 19 bp, Homo sapiens
gttttatctgaatggcgct

SEQ ID NO: 2757 - DNA, 19 bp, Homo sapiens
ttttatctgaatggcgctg

SEQ ID NO: 2758 - DNA, 19 bp, Homo sapiens
tttatctgaatggcgctga

SEQ ID NO: 2759 - DNA, 19 bp, Homo sapiens
ttatctgaatggcgctgat

SEQ ID NO: 2760 - DNA, 19 bp, Homo sapiens
tatctgaatggcgctgatt

SEQ ID NO: 2761 - DNA, 19 bp, Homo sapiens
atctgaatggcgctgattc

SEQ ID NO: 2762 - DNA, 19 bp, Homo sapiens
tctgaatggcgctgattct

SEQ ID NO: 2763 - DNA, 19 bp, Homo sapiens
ctgaatggcgctgattctg

SEQ ID NO: 2764 - DNA, 19 bp, Homo sapiens
tgaatggcgctgattctgc

SEQ ID NO: 2765 - DNA, 19 bp, Homo sapiens
gaatggcgctgattctgcc

SEQ ID NO: 2766 - DNA, 19 bp, Homo sapiens
aatggcgctgattctgcca

SEQ ID NO: 2767 - DNA, 19 bp, Homo sapiens
atggcgctgattctgccaa

SEQ ID NO: 2768 - DNA, 19 bp, Homo sapiens
tggcgctgattctgccaag

SEQ ID NO: 2769 - DNA, 19 bp, Homo sapiens
ggcgctgattctgccaagt

SEQ ID NO: 2770 - DNA, 19 bp, Homo sapiens
gcgctgattctgccaagtg

SEQ ID NO: 2771 - DNA, 19 bp, Homo sapiens
cgctgattctgccaagtgc

SEQ ID NO: 2772 - DNA, 19 bp, Homo sapiens
gctgattctgccaagtgca

SEQ ID NO: 2773 - DNA, 19 bp, Homo sapiens
ctgattctgccaagtgcac

SEQ ID NO: 2774 - DNA, 19 bp, Homo sapiens
tgattctgccaagtgcact

SEQ ID NO: 2775 - DNA, 19 bp, Homo sapiens
gattctgccaagtgcactg

SEQ ID NO: 2776 - DNA, 19 bp, Homo sapiens
attctgccaagtgcactga

SEQ ID NO: 2777 - DNA, 19 bp, Homo sapiens
ttctgccaagtgcactgag

SEQ ID NO: 2778 - DNA, 19 bp, Homo sapiens
tctgccaagtgcactgagg

SEQ ID NO: 2779 - DNA, 19 bp, Homo sapiens
ctgccaagtgcactgagga

SEQ ID NO: 2780 - DNA, 19 bp, Homo sapiens
tgccaagtgcactgaggaa

SEQ ID NO: 2781 - DNA, 19 bp, Homo sapiens
gccaagtgcactgaggaag

SEQ ID NO: 2782 - DNA, 19 bp, Homo sapiens
ccaagtgcactgaggaagg

SEQ ID NO: 2783 - DNA, 19 bp, Homo sapiens
caagtgcactgaggaagga

SEQ ID NO: 2784 - DNA, 19 bp, Homo sapiens
aagtgcactgaggaaggaa

SEQ ID NO: 2785 - DNA, 19 bp, Homo sapiens
agtgcactgaggaaggaaa

SEQ ID NO: 2786 - DNA, 19 bp, Homo sapiens
gtgcactgaggaaggaaaa

SEQ ID NO: 2787 - DNA, 19 bp, Homo sapiens
tgcactgaggaaggaaaat

SEQ ID NO: 2788 - DNA, 19 bp, Homo sapiens
gcactgaggaaggaaaatg

SEQ ID NO: 2789 - DNA, 19 bp, Homo sapiens
cactgaggaaggaaaatgg

SEQ ID NO: 2790 - DNA, 19 bp, Homo sapiens
actgaggaaggaaaatgga

SEQ ID NO: 2791 - DNA, 19 bp, Homo sapiens
ctgaggaaggaaaatggag

SEQ ID NO: 2792 - DNA, 19 bp, Homo sapiens
tgaggaaggaaaatggagc

SEQ ID NO: 2793 - DNA, 19 bp, Homo sapiens
gaggaaggaaaatggagcc

SEQ ID NO: 2794 - DNA, 19 bp, Homo sapiens
aggaaggaaaatggagccc

SEQ ID NO: 2795 - DNA, 19 bp, Homo sapiens
ggaaggaaaatggagcccg

SEQ ID NO: 2796 - DNA, 19 bp, Homo sapiens
gaaggaaaatggagcccgg

SEQ ID NO: 2797 - DNA, 19 bp, Homo sapiens
aaggaaaatggagcccgga

SEQ ID NO: 2798 - DNA, 19 bp, Homo sapiens
aggaaaatggagcccggag

SEQ ID NO: 2799 - DNA, 19 bp, Homo sapiens
ggaaaatggagcccggagc

SEQ ID NO: 2800 - DNA, 19 bp, Homo sapiens
gaaaatggagcccggagct

SEQ ID NO: 2801 - DNA, 19 bp, Homo sapiens
aaaatggagcccggagctt

SEQ ID NO: 2802 - DNA, 19 bp, Homo sapiens
aaatggagcccggagcttc

SEQ ID NO: 2803 - DNA, 19 bp, Homo sapiens
aatggagcccggagcttcc

SEQ ID NO: 2804 - DNA, 19 bp, Homo sapiens
atggagcccggagcttcct

SEQ ID NO: 2805 - DNA, 19 bp, Homo sapiens
tggagcccggagcttcctg

SEQ ID NO: 2806 - DNA, 19 bp, Homo sapiens
ggagcccggagcttcctgt

SEQ ID NO: 2807 - DNA, 19 bp, Homo sapiens
gagcccggagcttcctgtc

SEQ ID NO: 2808 - DNA, 19 bp, Homo sapiens
agcccggagcttcctgtct

SEQ ID NO: 2809 - DNA, 19 bp, Homo sapiens
gcccggagcttcctgtctg

SEQ ID NO: 2810 - DNA, 19 bp, Homo sapiens
cccggagcttcctgtctgt

SEQ ID NO: 2811 - DNA, 19 bp, Homo sapiens
ccggagcttcctgtctgtg

SEQ ID NO: 2812 - DNA, 19 bp, Homo sapiens
cggagcttcctgtctgtgc

SEQ ID NO: 2813 - DNA, 19 bp, Homo sapiens
ggagcttcctgtctgtgct

SEQ ID NO: 2814 - DNA, 19 bp, Homo sapiens
gagcttcctgtctgtgctc

SEQ ID NO: 2815 - DNA, 19 bp, Homo sapiens
agcttcctgtctgtgctcc

SEQ ID NO: 2816 - DNA, 19 bp, Homo sapiens
gcttcctgtctgtgctccc

SEQ ID NO: 2817 - DNA, 19 bp, Homo sapiens
cttcctgtctgtgctccca

SEQ ID NO: 2818 - DNA, 19 bp, Homo sapiens
ttcctgtctgtgctcccat

SEQ ID NO: 2819 - DNA, 19 bp, Homo sapiens
tcctgtctgtgctcccatc

SEQ ID NO: 2820 - DNA, 19 bp, Homo sapiens
cctgtctgtgctcccatca

SEQ ID NO: 2821 - DNA, 19 bp, Homo sapiens
ctgtctgtgctcccatcat

SEQ ID NO: 2822 - DNA, 19 bp, Homo sapiens
tgtctgtgctcccatcatc

SEQ ID NO: 2823 - DNA, 19 bp, Homo sapiens
gtctgtgctcccatcatct

SEQ ID NO: 2824 - DNA, 19 bp, Homo sapiens
tctgtgctcccatcatctg

SEQ ID NO: 2825 - DNA, 19 bp, Homo sapiens
ctgtgctcccatcatctgc

SEQ ID NO: 2826 - DNA, 19 bp, Homo sapiens
tgtgctcccatcatctgcc

SEQ ID NO: 2827 - DNA, 19 bp, Homo sapiens
gtgctcccatcatctgccc

SEQ ID NO: 2828 - DNA, 19 bp, Homo sapiens
tgctcccatcatctgccct

SEQ ID NO: 2829 - DNA, 19 bp, Homo sapiens
gctcccatcatctgccctc

SEQ ID NO: 2830 - DNA, 19 bp, Homo sapiens
ctcccatcatctgccctcc

SEQ ID NO: 2831 - DNA, 19 bp, Homo sapiens
tcccatcatctgccctcca

SEQ ID NO: 2832 - DNA, 19 bp, Homo sapiens
cccatcatctgccctccac

SEQ ID NO: 2833 - DNA, 19 bp, Homo sapiens
ccatcatctgccctccacc

SEQ ID NO: 2834 - DNA, 19 bp, Homo sapiens
catcatctgccctccacca

SEQ ID NO: 2835 - DNA, 19 bp, Homo sapiens
atcatctgccctccaccat

SEQ ID NO: 2836 - DNA, 19 bp, Homo sapiens
tcatctgccctccaccatc

SEQ ID NO: 2837 - DNA, 19 bp, Homo sapiens
catctgccctccaccatcc

SEQ ID NO: 2838 - DNA, 19 bp, Homo sapiens
atctgccctccaccatcca

SEQ ID NO: 2839 - DNA, 19 bp, Homo sapiens
tctgccctccaccatccat

SEQ ID NO: 2840 - DNA, 19 bp, Homo sapiens
ctgccctccaccatccata

SEQ ID NO: 2841 - DNA, 19 bp, Homo sapiens
tgccctccaccatccatac

SEQ ID NO: 2842 - DNA, 19 bp, Homo sapiens
gccctccaccatccatacc

SEQ ID NO: 2843 - DNA, 19 bp, Homo sapiens
ccctccaccatccatacct

SEQ ID NO: 2844 - DNA, 19 bp, Homo sapiens
cctccaccatccataccta

SEQ ID NO: 2845 - DNA, 19 bp, Homo sapiens
ctccaccatccatacctac

SEQ ID NO: 2846 - DNA, 19 bp, Homo sapiens
tccaccatccatacctacg

SEQ ID NO: 2847 - DNA, 19 bp, Homo sapiens
ccaccatccatacctacgt

SEQ ID NO: 2848 - DNA, 19 bp, Homo sapiens
caccatccatacctacgtt

SEQ ID NO: 2849 - DNA, 19 bp, Homo sapiens
accatccatacctacgttt

SEQ ID NO: 2850 - DNA, 19 bp, Homo sapiens
ccatccatacctacgtttg

SEQ ID NO: 2851 - DNA, 19 bp, Homo sapiens
catccatacctacgtttgc

SEQ ID NO: 2852 - DNA, 19 bp, Homo sapiens
atccatacctacgtttgca

SEQ ID NO: 2853 - DNA, 19 bp, Homo sapiens
tccatacctacgtttgcaa

SEQ ID NO: 2854 - DNA, 19 bp, Homo sapiens
ccatacctacgtttgcaac

SEQ ID NO: 2855 - DNA, 19 bp, Homo sapiens
catacctacgtttgcaaca

SEQ ID NO: 2856 - DNA, 19 bp, Homo sapiens
atacctacgtttgcaacac

SEQ ID NO: 2857 - DNA, 19 bp, Homo sapiens
tacctacgtttgcaacact

SEQ ID NO: 2858 - DNA, 19 bp, Homo sapiens
acctacgtttgcaacactt

SEQ ID NO: 2859 - DNA, 19 bp, Homo sapiens
cctacgtttgcaacacttc

SEQ ID NO: 2860 - DNA, 19 bp, Homo sapiens
ctacgtttgcaacacttcg

SEQ ID NO: 2861 - DNA, 19 bp, Homo sapiens
tacgtttgcaacacttcgt

SEQ ID NO: 2862 - DNA, 19 bp, Homo sapiens
acgtttgcaacacttcgtg

SEQ ID NO: 2863 - DNA, 19 bp, Homo sapiens
cgtttgcaacacttcgtgt

SEQ ID NO: 2864 - DNA, 19 bp, Homo sapiens
gtttgcaacacttcgtgtt

SEQ ID NO: 2865 - DNA, 19 bp, Homo sapiens
tttgcaacacttcgtgttt

SEQ ID NO: 2866 - DNA, 19 bp, Homo sapiens
ttgcaacacttcgtgttta

SEQ ID NO: 2867 - DNA, 19 bp, Homo sapiens
tgcaacacttcgtgtttat

SEQ ID NO: 2868 - DNA, 19 bp, Homo sapiens
gcaacacttcgtgtttata

SEQ ID NO: 2869 - DNA, 19 bp, Homo sapiens
caacacttcgtgtttataa

SEQ ID NO: 2870 - DNA, 19 bp, Homo sapiens
aacacttcgtgtttataag

SEQ ID NO: 2871 - DNA, 19 bp, Homo sapiens
acacttcgtgtttataagc

SEQ ID NO: 2872 - DNA, 19 bp, Homo sapiens
cacttcgtgtttataagcc

SEQ ID NO: 2873 - DNA, 19 bp, Homo sapiens
acttcgtgtttataagcca

SEQ ID NO: 2874 - DNA, 19 bp, Homo sapiens
cttcgtgtttataagccat

SEQ ID NO: 2875 - DNA, 19 bp, Homo sapiens
ttcgtgtttataagccatc

SEQ ID NO: 2876 - DNA, 19 bp, Homo sapiens
tcgtgtttataagccatca

SEQ ID NO: 2877 - DNA, 19 bp, Homo sapiens
cgtgtttataagccatcag

SEQ ID NO: 2878 - DNA, 19 bp, Homo sapiens
gtgtttataagccatcagc

SEQ ID NO: 2879 - DNA, 19 bp, Homo sapiens
tgtttataagccatcagct

SEQ ID NO: 2880 - DNA, 19 bp, Homo sapiens
gtttataagccatcagctg

SEQ ID NO: 2881 - DNA, 19 bp, Homo sapiens
tttataagccatcagctgg

SEQ ID NO: 2882 - DNA, 19 bp, Homo sapiens
ttataagccatcagctgga

SEQ ID NO: 2883 - DNA, 19 bp, Homo sapiens
tataagccatcagctggaa

SEQ ID NO: 2884 - DNA, 19 bp, Homo sapiens
ataagccatcagctggaaa

SEQ ID NO: 2885 - DNA, 19 bp, Homo sapiens
taagccatcagctggaaac

SEQ ID NO: 2886 - DNA, 19 bp, Homo sapiens
aagccatcagctggaaaca

SEQ ID NO: 2887 - DNA, 19 bp, Homo sapiens
agccatcagctggaaacaa

SEQ ID NO: 2888 - DNA, 19 bp, Homo sapiens
gccatcagctggaaacaat

SEQ ID NO: 2889 - DNA, 19 bp, Homo sapiens
ccatcagctggaaacaatt

SEQ ID NO: 2890 - DNA, 19 bp, Homo sapiens
catcagctggaaacaattc

SEQ ID NO: 2891 - DNA, 19 bp, Homo sapiens
atcagctggaaacaattcc

SEQ ID NO: 2892 - DNA, 19 bp, Homo sapiens
tcagctggaaacaattccc

SEQ ID NO: 2893 - DNA, 19 bp, Homo sapiens
cagctggaaacaattccct

SEQ ID NO: 2894 - DNA, 19 bp, Homo sapiens
agctggaaacaattccctc

SEQ ID NO: 2895 - DNA, 19 bp, Homo sapiens
gctggaaacaattccctct

SEQ ID NO: 2896 - DNA, 19 bp, Homo sapiens
ctggaaacaattccctcta

SEQ ID NO: 2897 - DNA, 19 bp, Homo sapiens
tggaaacaattccctctat

SEQ ID NO: 2898 - DNA, 19 bp, Homo sapiens
ggaaacaattccctctatc

SEQ ID NO: 2899 - DNA, 19 bp, Homo sapiens
gaaacaattccctctatcg

SEQ ID NO: 2900 - DNA, 19 bp, Homo sapiens
aaacaattccctctatcgg

SEQ ID NO: 2901 - DNA, 19 bp, Homo sapiens
aacaattccctctatcggg

SEQ ID NO: 2902 - DNA, 19 bp, Homo sapiens
acaattccctctatcggga

SEQ ID NO: 2903 - DNA, 19 bp, Homo sapiens
caattccctctatcgggac

SEQ ID NO: 2904 - DNA, 19 bp, Homo sapiens
aattccctctatcgggaca

SEQ ID NO: 2905 - DNA, 19 bp, Homo sapiens
attccctctatcgggacac

SEQ ID NO: 2906 - DNA, 19 bp, Homo sapiens
ttccctctatcgggacaca

SEQ ID NO: 2907 - DNA, 19 bp, Homo sapiens
tccctctatcgggacacag

SEQ ID NO: 2908 - DNA, 19 bp, Homo sapiens
ccctctatcgggacacagc

SEQ ID NO: 2909 - DNA, 19 bp, Homo sapiens
cctctatcgggacacagca

SEQ ID NO: 2910 - DNA, 19 bp, Homo sapiens
ctctatcgggacacagcag

SEQ ID NO: 2911 - DNA, 19 bp, Homo sapiens
tctatcgggacacagcagt

SEQ ID NO: 2912 - DNA, 19 bp, Homo sapiens
ctatcgggacacagcagtt

SEQ ID NO: 2913 - DNA, 19 bp, Homo sapiens
tatcgggacacagcagttt

SEQ ID NO: 2914 - DNA, 19 bp, Homo sapiens
atcgggacacagcagtttt

SEQ ID NO: 2915 - DNA, 19 bp, Homo sapiens
tcgggacacagcagttttt

SEQ ID NO: 2916 - DNA, 19 bp, Homo sapiens
cgggacacagcagtttttg

SEQ ID NO: 2917 - DNA, 19 bp, Homo sapiens
gggacacagcagtttttga

SEQ ID NO: 2918 - DNA, 19 bp, Homo sapiens
ggacacagcagtttttgaa

SEQ ID NO: 2919 - DNA, 19 bp, Homo sapiens
gacacagcagtttttgaat

SEQ ID NO: 2920 - DNA, 19 bp, Homo sapiens
acacagcagtttttgaatg

SEQ ID NO: 2921 - DNA, 19 bp, Homo sapiens
cacagcagtttttgaatgt

SEQ ID NO: 2922 - DNA, 19 bp, Homo sapiens
acagcagtttttgaatgtt

SEQ ID NO: 2923 - DNA, 19 bp, Homo sapiens
cagcagtttttgaatgttt

SEQ ID NO: 2924 - DNA, 19 bp, Homo sapiens
agcagtttttgaatgtttg

SEQ ID NO: 2925 - DNA, 19 bp, Homo sapiens
gcagtttttgaatgtttgc

SEQ ID NO: 2926 - DNA, 19 bp, Homo sapiens
cagtttttgaatgtttgcc

SEQ ID NO: 2927 - DNA, 19 bp, Homo sapiens
agtttttgaatgtttgcca

SEQ ID NO: 2928 - DNA, 19 bp, Homo sapiens
gtttttgaatgtttgccac

SEQ ID NO: 2929 - DNA, 19 bp, Homo sapiens
tttttgaatgtttgccaca

SEQ ID NO: 2930 - DNA, 19 bp, Homo sapiens
ttttgaatgtttgccacaa

SEQ ID NO: 2931 - DNA, 19 bp, Homo sapiens
tttgaatgtttgccacaac

SEQ ID NO: 2932 - DNA, 19 bp, Homo sapiens
ttgaatgtttgccacaaca

SEQ ID NO: 2933 - DNA, 19 bp, Homo sapiens
tgaatgtttgccacaacat

SEQ ID NO: 2934 - DNA, 19 bp, Homo sapiens
gaatgtttgccacaacatg

SEQ ID NO: 2935 - DNA, 19 bp, Homo sapiens
aatgtttgccacaacatgc

SEQ ID NO: 2936 - DNA, 19 bp, Homo sapiens
atgtttgccacaacatgcg

SEQ ID NO: 2937 - DNA, 19 bp, Homo sapiens
tgtttgccacaacatgcga

SEQ ID NO: 2938 - DNA, 19 bp, Homo sapiens
gtttgccacaacatgcgat

SEQ ID NO: 2939 - DNA, 19 bp, Homo sapiens
tttgccacaacatgcgatg

SEQ ID NO: 2940 - DNA, 19 bp, Homo sapiens
ttgccacaacatgcgatgt

SEQ ID NO: 2941 - DNA, 19 bp, Homo sapiens
tgccacaacatgcgatgtt

SEQ ID NO: 2942 - DNA, 19 bp, Homo sapiens
gccacaacatgcgatgttt

SEQ ID NO: 2943 - DNA, 19 bp, Homo sapiens
ccacaacatgcgatgtttg

SEQ ID NO: 2944 - DNA, 19 bp, Homo sapiens
cacaacatgcgatgtttgg

SEQ ID NO: 2945 - DNA, 19 bp, Homo sapiens
acaacatgcgatgtttgga

SEQ ID NO: 2946 - DNA, 19 bp, Homo sapiens
caacatgcgatgtttggaa

SEQ ID NO: 2947 - DNA, 19 bp, Homo sapiens
aacatgcgatgtttggaaa

SEQ ID NO: 2948 - DNA, 19 bp, Homo sapiens
acatgcgatgtttggaaat

SEQ ID NO: 2949 - DNA, 19 bp, Homo sapiens
catgcgatgtttggaaatg

SEQ ID NO: 2950 - DNA, 19 bp, Homo sapiens
atgcgatgtttggaaatga

SEQ ID NO: 2951 - DNA, 19 bp, Homo sapiens
tgcgatgtttggaaatgat

SEQ ID NO: 2952 - DNA, 19 bp, Homo sapiens
gcgatgtttggaaatgata

SEQ ID NO: 2953 - DNA, 19 bp, Homo sapiens
cgatgtttggaaatgatac

SEQ ID NO: 2954 - DNA, 19 bp, Homo sapiens
gatgtttggaaatgataca

SEQ ID NO: 2955 - DNA, 19 bp, Homo sapiens
atgtttggaaatgatacaa

SEQ ID NO: 2956 - DNA, 19 bp, Homo sapiens
tgtttggaaatgatacaat

SEQ ID NO: 2957 - DNA, 19 bp, Homo sapiens
gtttggaaatgatacaatt

SEQ ID NO: 2958 - DNA, 19 bp, Homo sapiens
tttggaaatgatacaatta

SEQ ID NO: 2959 - DNA, 19 bp, Homo sapiens
ttggaaatgatacaattac

SEQ ID NO: 2960 - DNA, 19 bp, Homo sapiens
tggaaatgatacaattacc

SEQ ID NO: 2961 - DNA, 19 bp, Homo sapiens
ggaaatgatacaattacct

SEQ ID NO: 2962 - DNA, 19 bp, Homo sapiens
gaaatgatacaattacctg

SEQ ID NO: 2963 - DNA, 19 bp, Homo sapiens
aaatgatacaattacctgc

SEQ ID NO: 2964 - DNA, 19 bp, Homo sapiens
aatgatacaattacctgca

SEQ ID NO: 2965 - DNA, 19 bp, Homo sapiens
atgatacaattacctgcac

SEQ ID NO: 2966 - DNA, 19 bp, Homo sapiens
tgatacaattacctgcacg

SEQ ID NO: 2967 - DNA, 19 bp, Homo sapiens
gatacaattacctgcacga

SEQ ID NO: 2968 - DNA, 19 bp, Homo sapiens
atacaattacctgcacgac

SEQ ID NO: 2969 - DNA, 19 bp, Homo sapiens
tacaattacctgcacgaca

SEQ ID NO: 2970 - DNA, 19 bp, Homo sapiens
acaattacctgcacgacac

SEQ ID NO: 2971 - DNA, 19 bp, Homo sapiens
caattacctgcacgacaca

SEQ ID NO: 2972 - DNA, 19 bp, Homo sapiens
aattacctgcacgacacat

SEQ ID NO: 2973 - DNA, 19 bp, Homo sapiens
attacctgcacgacacatg

SEQ ID NO: 2974 - DNA, 19 bp, Homo sapiens
ttacctgcacgacacatgg

SEQ ID NO: 2975 - DNA, 19 bp, Homo sapiens
tacctgcacgacacatgga

SEQ ID NO: 2976 - DNA, 19 bp, Homo sapiens
acctgcacgacacatggaa

SEQ ID NO: 2977 - DNA, 19 bp, Homo sapiens
cctgcacgacacatggaaa

SEQ ID NO: 2978 - DNA, 19 bp, Homo sapiens
ctgcacgacacatggaaat

SEQ ID NO: 2979 - DNA, 19 bp, Homo sapiens
tgcacgacacatggaaatt

SEQ ID NO: 2980 - DNA, 19 bp, Homo sapiens
gcacgacacatggaaattg

SEQ ID NO: 2981 - DNA, 19 bp, Homo sapiens
cacgacacatggaaattgg

SEQ ID NO: 2982 - DNA, 19 bp, Homo sapiens
acgacacatggaaattgga

SEQ ID NO: 2983 - DNA, 19 bp, Homo sapiens
cgacacatggaaattggac

SEQ ID NO: 2984 - DNA, 19 bp, Homo sapiens
gacacatggaaattggact

SEQ ID NO: 2985 - DNA, 19 bp, Homo sapiens
acacatggaaattggacta

SEQ ID NO: 2986 - DNA, 19 bp, Homo sapiens
cacatggaaattggactaa

SEQ ID NO: 2987 - DNA, 19 bp, Homo sapiens
acatggaaattggactaaa

SEQ ID NO: 2988 - DNA, 19 bp, Homo sapiens
catggaaattggactaaat

SEQ ID NO: 2989 - DNA, 19 bp, Homo sapiens
atggaaattggactaaatt

SEQ ID NO: 2990 - DNA, 19 bp, Homo sapiens
tggaaattggactaaatta

SEQ ID NO: 2991 - DNA, 19 bp, Homo sapiens
ggaaattggactaaattac

SEQ ID NO: 2992 - DNA, 19 bp, Homo sapiens
gaaattggactaaattacc

SEQ ID NO: 2993 - DNA, 19 bp, Homo sapiens
aaattggactaaattacca

SEQ ID NO: 2994 - DNA, 19 bp, Homo sapiens
aattggactaaattaccag

SEQ ID NO: 2995 - DNA, 19 bp, Homo sapiens
attggactaaattaccaga

SEQ ID NO: 2996 - DNA, 19 bp, Homo sapiens
ttggactaaattaccagaa

SEQ ID NO: 2997 - DNA, 19 bp, Homo sapiens
tggactaaattaccagaat

SEQ ID NO: 2998 - DNA, 19 bp, Homo sapiens
ggactaaattaccagaatg

SEQ ID NO: 2999 - DNA, 19 bp, Homo sapiens
gactaaattaccagaatgc

SEQ ID NO: 3000 - DNA, 19 bp, Homo sapiens
actaaattaccagaatgca

SEQ ID NO: 3001 - DNA, 19 bp, Homo sapiens
ctaaattaccagaatgcag

SEQ ID NO: 3002 - DNA, 19 bp, Homo sapiens
taaattaccagaatgcagg

SEQ ID NO: 3003 - DNA, 19 bp, Homo sapiens
aaattaccagaatgcaggg

SEQ ID NO: 3004 - DNA, 19 bp, Homo sapiens
aattaccagaatgcaggga

SEQ ID NO: 3005 - DNA, 19 bp, Homo sapiens
attaccagaatgcagggaa

SEQ ID NO: 3006 - DNA, 19 bp, Homo sapiens
ttaccagaatgcagggaag

SEQ ID NO: 3007 - DNA, 19 bp, Homo sapiens
taccagaatgcagggaagt

SEQ ID NO: 3008 - DNA, 19 bp, Homo sapiens
accagaatgcagggaagta

SEQ ID NO: 3009 - DNA, 19 bp, Homo sapiens
ccagaatgcagggaagtaa

SEQ ID NO: 3010 - DNA, 19 bp, Homo sapiens
cagaatgcagggaagtaaa

SEQ ID NO: 3011 - DNA, 19 bp, Homo sapiens
agaatgcagggaagtaaaa

SEQ ID NO: 3012 - DNA, 19 bp, Homo sapiens
gaatgcagggaagtaaaat

SEQ ID NO: 3013 - DNA, 19 bp, Homo sapiens
aatgcagggaagtaaaatg

SEQ ID NO: 3014 - DNA, 19 bp, Homo sapiens
atgcagggaagtaaaatgc

SEQ ID NO: 3015 - DNA, 19 bp, Homo sapiens
tgcagggaagtaaaatgcc

SEQ ID NO: 3016 - DNA, 19 bp, Homo sapiens
gcagggaagtaaaatgccc

SEQ ID NO: 3017 - DNA, 19 bp, Homo sapiens
cagggaagtaaaatgccca

SEQ ID NO: 3018 - DNA, 19 bp, Homo sapiens
agggaagtaaaatgcccat

SEQ ID NO: 3019 - DNA, 19 bp, Homo sapiens
gggaagtaaaatgcccatt

SEQ ID NO: 3020 - DNA, 19 bp, Homo sapiens
ggaagtaaaatgcccattc

SEQ ID NO: 3021 - DNA, 19 bp, Homo sapiens
gaagtaaaatgcccattcc

SEQ ID NO: 3022 - DNA, 19 bp, Homo sapiens
aagtaaaatgcccattccc

SEQ ID NO: 3023 - DNA, 19 bp, Homo sapiens
agtaaaatgcccattccca

SEQ ID NO: 3024 - DNA, 19 bp, Homo sapiens
gtaaaatgcccattcccat

SEQ ID NO: 3025 - DNA, 19 bp, Homo sapiens
taaaatgcccattcccatc

SEQ ID NO: 3026 - DNA, 19 bp, Homo sapiens
aaaatgcccattcccatca

SEQ ID NO: 3027 - DNA, 19 bp, Homo sapiens
aaatgcccattcccatcaa

SEQ ID NO: 3028 - DNA, 19 bp, Homo sapiens
aatgcccattcccatcaag

SEQ ID NO: 3029 - DNA, 19 bp, Homo sapiens
atgcccattcccatcaaga

SEQ ID NO: 3030 - DNA, 19 bp, Homo sapiens
tgcccattcccatcaagac

SEQ ID NO: 3031 - DNA, 19 bp, Homo sapiens
gcccattcccatcaagacc

SEQ ID NO: 3032 - DNA, 19 bp, Homo sapiens
cccattcccatcaagacca

SEQ ID NO: 3033 - DNA, 19 bp, Homo sapiens
ccattcccatcaagaccag

SEQ ID NO: 3034 - DNA, 19 bp, Homo sapiens
cattcccatcaagaccaga

SEQ ID NO: 3035 - DNA, 19 bp, Homo sapiens
attcccatcaagaccagac

SEQ ID NO: 3036 - DNA, 19 bp, Homo sapiens
ttcccatcaagaccagaca

SEQ ID NO: 3037 - DNA, 19 bp, Homo sapiens
tcccatcaagaccagacaa

SEQ ID NO: 3038 - DNA, 19 bp, Homo sapiens
cccatcaagaccagacaat

SEQ ID NO: 3039 - DNA, 19 bp, Homo sapiens
ccatcaagaccagacaatg

SEQ ID NO: 3040 - DNA, 19 bp, Homo sapiens
catcaagaccagacaatgg

SEQ ID NO: 3041 - DNA, 19 bp, Homo sapiens
atcaagaccagacaatgga

SEQ ID NO: 3042 - DNA, 19 bp, Homo sapiens
tcaagaccagacaatggat

SEQ ID NO: 3043 - DNA, 19 bp, Homo sapiens
caagaccagacaatggatt

SEQ ID NO: 3044 - DNA, 19 bp, Homo sapiens
aagaccagacaatggattt

SEQ ID NO: 3045 - DNA, 19 bp, Homo sapiens
agaccagacaatggatttg

SEQ ID NO: 3046 - DNA, 19 bp, Homo sapiens
gaccagacaatggatttgt

SEQ ID NO: 3047 - DNA, 19 bp, Homo sapiens
accagacaatggatttgtg

SEQ ID NO: 3048 - DNA, 19 bp, Homo sapiens
ccagacaatggatttgtga

SEQ ID NO: 3049 - DNA, 19 bp, Homo sapiens
cagacaatggatttgtgaa

SEQ ID NO: 3050 - DNA, 19 bp, Homo sapiens
agacaatggatttgtgaac

SEQ ID NO: 3051 - DNA, 19 bp, Homo sapiens
gacaatggatttgtgaact

SEQ ID NO: 3052 - DNA, 19 bp, Homo sapiens
acaatggatttgtgaacta

SEQ ID NO: 3053 - DNA, 19 bp, Homo sapiens
caatggatttgtgaactat

SEQ ID NO: 3054 - DNA, 19 bp, Homo sapiens
aatggatttgtgaactatc

SEQ ID NO: 3055 - DNA, 19 bp, Homo sapiens
atggatttgtgaactatcc

SEQ ID NO: 3056 - DNA, 19 bp, Homo sapiens
tggatttgtgaactatcct

SEQ ID NO: 3057 - DNA, 19 bp, Homo sapiens
ggatttgtgaactatcctg

SEQ ID NO: 3058 - DNA, 19 bp, Homo sapiens
gatttgtgaactatcctgc

SEQ ID NO: 3059 - DNA, 19 bp, Homo sapiens
atttgtgaactatcctgca

SEQ ID NO: 3060 - DNA, 19 bp, Homo sapiens
tttgtgaactatcctgcaa

SEQ ID NO: 3061 - DNA, 19 bp, Homo sapiens
ttgtgaactatcctgcaaa

SEQ ID NO: 3062 - DNA, 19 bp, Homo sapiens
tgtgaactatcctgcaaaa

SEQ ID NO: 3063 - DNA, 19 bp, Homo sapiens
gtgaactatcctgcaaaac

SEQ ID NO: 3064 - DNA, 19 bp, Homo sapiens
tgaactatcctgcaaaacc

SEQ ID NO: 3065 - DNA, 19 bp, Homo sapiens
gaactatcctgcaaaacca

SEQ ID NO: 3066 - DNA, 19 bp, Homo sapiens
aactatcctgcaaaaccaa

SEQ ID NO: 3067 - DNA, 19 bp, Homo sapiens
actatcctgcaaaaccaac

SEQ ID NO: 3068 - DNA, 19 bp, Homo sapiens
ctatcctgcaaaaccaaca

SEQ ID NO: 3069 - DNA, 19 bp, Homo sapiens
tatcctgcaaaaccaacac

SEQ ID NO: 3070 - DNA, 19 bp, Homo sapiens
atcctgcaaaaccaacact

SEQ ID NO: 3071 - DNA, 19 bp, Homo sapiens
tcctgcaaaaccaacactt

SEQ ID NO: 3072 - DNA, 19 bp, Homo sapiens
cctgcaaaaccaacacttt

SEQ ID NO: 3073 - DNA, 19 bp, Homo sapiens
ctgcaaaaccaacacttta

SEQ ID NO: 3074 - DNA, 19 bp, Homo sapiens
tgcaaaaccaacactttat

SEQ ID NO: 3075 - DNA, 19 bp, Homo sapiens
gcaaaaccaacactttatt

SEQ ID NO: 3076 - DNA, 19 bp, Homo sapiens
caaaaccaacactttatta

SEQ ID NO: 3077 - DNA, 19 bp, Homo sapiens
aaaaccaacactttattac

SEQ ID NO: 3078 - DNA, 19 bp, Homo sapiens
aaaccaacactttattaca

SEQ ID NO: 3079 - DNA, 19 bp, Homo sapiens
aaccaacactttattacaa

SEQ ID NO: 3080 - DNA, 19 bp, Homo sapiens
accaacactttattacaag

SEQ ID NO: 3081 - DNA, 19 bp, Homo sapiens
ccaacactttattacaagg

SEQ ID NO: 3082 - DNA, 19 bp, Homo sapiens
caacactttattacaagga

SEQ ID NO: 3083 - DNA, 19 bp, Homo sapiens
aacactttattacaaggat

SEQ ID NO: 3084 - DNA, 19 bp, Homo sapiens
acactttattacaaggata

SEQ ID NO: 3085 - DNA, 19 bp, Homo sapiens
cactttattacaaggataa

SEQ ID NO: 3086 - DNA, 19 bp, Homo sapiens
actttattacaaggataaa

SEQ ID NO: 3087 - DNA, 19 bp, Homo sapiens
ctttattacaaggataaag

SEQ ID NO: 3088 - DNA, 19 bp, Homo sapiens
tttattacaaggataaagc

SEQ ID NO: 3089 - DNA, 19 bp, Homo sapiens
ttattacaaggataaagcc

SEQ ID NO: 3090 - DNA, 19 bp, Homo sapiens
tattacaaggataaagcca

SEQ ID NO: 3091 - DNA, 19 bp, Homo sapiens
attacaaggataaagccac

SEQ ID NO: 3092 - DNA, 19 bp, Homo sapiens
ttacaaggataaagccaca

SEQ ID NO: 3093 - DNA, 19 bp, Homo sapiens
tacaaggataaagccacat

SEQ ID NO: 3094 - DNA, 19 bp, Homo sapiens
acaaggataaagccacatt

SEQ ID NO: 3095 - DNA, 19 bp, Homo sapiens
caaggataaagccacattt

SEQ ID NO: 3096 - DNA, 19 bp, Homo sapiens
aaggataaagccacatttg

SEQ ID NO: 3097 - DNA, 19 bp, Homo sapiens
aggataaagccacatttgg

SEQ ID NO: 3098 - DNA, 19 bp, Homo sapiens
ggataaagccacatttggc

SEQ ID NO: 3099 - DNA, 19 bp, Homo sapiens
gataaagccacatttggct

SEQ ID NO: 3100 - DNA, 19 bp, Homo sapiens
ataaagccacatttggctg

SEQ ID NO: 3101 - DNA, 19 bp, Homo sapiens
taaagccacatttggctgc

SEQ ID NO: 3102 - DNA, 19 bp, Homo sapiens
aaagccacatttggctgcc

SEQ ID NO: 3103 - DNA, 19 bp, Homo sapiens
aagccacatttggctgcca

SEQ ID NO: 3104 - DNA, 19 bp, Homo sapiens
agccacatttggctgccat

SEQ ID NO: 3105 - DNA, 19 bp, Homo sapiens
gccacatttggctgccatg

SEQ ID NO: 3106 - DNA, 19 bp, Homo sapiens
ccacatttggctgccatga

SEQ ID NO: 3107 - DNA, 19 bp, Homo sapiens
cacatttggctgccatgat

SEQ ID NO: 3108 - DNA, 19 bp, Homo sapiens
acatttggctgccatgatg

SEQ ID NO: 3109 - DNA, 19 bp, Homo sapiens
catttggctgccatgatgg

SEQ ID NO: 3110 - DNA, 19 bp, Homo sapiens
atttggctgccatgatgga

SEQ ID NO: 3111 - DNA, 19 bp, Homo sapiens
tttggctgccatgatggat

SEQ ID NO: 3112 - DNA, 19 bp, Homo sapiens
ttggctgccatgatggata

SEQ ID NO: 3113 - DNA, 19 bp, Homo sapiens
tggctgccatgatggatat

SEQ ID NO: 3114 - DNA, 19 bp, Homo sapiens
ggctgccatgatggatatt

SEQ ID NO: 3115 - DNA, 19 bp, Homo sapiens
gctgccatgatggatattc

SEQ ID NO: 3116 - DNA, 19 bp, Homo sapiens
ctgccatgatggatattct

SEQ ID NO: 3117 - DNA, 19 bp, Homo sapiens
tgccatgatggatattctc

SEQ ID NO: 3118 - DNA, 19 bp, Homo sapiens
gccatgatggatattctct

SEQ ID NO: 3119 - DNA, 19 bp, Homo sapiens
ccatgatggatattctctg

SEQ ID NO: 3120 - DNA, 19 bp, Homo sapiens
catgatggatattctctgg

SEQ ID NO: 3121 - DNA, 19 bp, Homo sapiens
atgatggatattctctgga

SEQ ID NO: 3122 - DNA, 19 bp, Homo sapiens
tgatggatattctctggat

SEQ ID NO: 3123 - DNA, 19 bp, Homo sapiens
gatggatattctctggatg

SEQ ID NO: 3124 - DNA, 19 bp, Homo sapiens
atggatattctctggatgg

SEQ ID NO: 3125 - DNA, 19 bp, Homo sapiens
tggatattctctggatggc

SEQ ID NO: 3126 - DNA, 19 bp, Homo sapiens
ggatattctctggatggcc

SEQ ID NO: 3127 - DNA, 19 bp, Homo sapiens
gatattctctggatggccc

SEQ ID NO: 3128 - DNA, 19 bp, Homo sapiens
atattctctggatggcccg

SEQ ID NO: 3129 - DNA, 19 bp, Homo sapiens
tattctctggatggcccgg

SEQ ID NO: 3130 - DNA, 19 bp, Homo sapiens
attctctggatggcccgga

SEQ ID NO: 3131 - DNA, 19 bp, Homo sapiens
ttctctggatggcccggaa

SEQ ID NO: 3132 - DNA, 19 bp, Homo sapiens
tctctggatggcccggaag

SEQ ID NO: 3133 - DNA, 19 bp, Homo sapiens
ctctggatggcccggaaga

SEQ ID NO: 3134 - DNA, 19 bp, Homo sapiens
tctggatggcccggaagaa

SEQ ID NO: 3135 - DNA, 19 bp, Homo sapiens
ctggatggcccggaagaaa

SEQ ID NO: 3136 - DNA, 19 bp, Homo sapiens
tggatggcccggaagaaat

SEQ ID NO: 3137 - DNA, 19 bp, Homo sapiens
ggatggcccggaagaaata

SEQ ID NO: 3138 - DNA, 19 bp, Homo sapiens
gatggcccggaagaaatag

SEQ ID NO: 3139 - DNA, 19 bp, Homo sapiens
atggcccggaagaaataga

SEQ ID NO: 3140 - DNA, 19 bp, Homo sapiens
tggcccggaagaaatagaa

SEQ ID NO: 3141 - DNA, 19 bp, Homo sapiens
ggcccggaagaaatagaat

SEQ ID NO: 3142 - DNA, 19 bp, Homo sapiens
gcccggaagaaatagaatg

SEQ ID NO: 3143 - DNA, 19 bp, Homo sapiens
cccggaagaaatagaatgt

SEQ ID NO: 3144 - DNA, 19 bp, Homo sapiens
ccggaagaaatagaatgta

SEQ ID NO: 3145 - DNA, 19 bp, Homo sapiens
cggaagaaatagaatgtac

SEQ ID NO: 3146 - DNA, 19 bp, Homo sapiens
ggaagaaatagaatgtacc

SEQ ID NO: 3147 - DNA, 19 bp, Homo sapiens
gaagaaatagaatgtacca

SEQ ID NO: 3148 - DNA, 19 bp, Homo sapiens
aagaaatagaatgtaccaa

SEQ ID NO: 3149 - DNA, 19 bp, Homo sapiens
agaaatagaatgtaccaaa

SEQ ID NO: 3150 - DNA, 19 bp, Homo sapiens
gaaatagaatgtaccaaac

SEQ ID NO: 3151 - DNA, 19 bp, Homo sapiens
aaatagaatgtaccaaact

SEQ ID NO: 3152 - DNA, 19 bp, Homo sapiens
aatagaatgtaccaaactg

SEQ ID NO: 3153 - DNA, 19 bp, Homo sapiens
atagaatgtaccaaactgg

SEQ ID NO: 3154 - DNA, 19 bp, Homo sapiens
tagaatgtaccaaactggg

SEQ ID NO: 3155 - DNA, 19 bp, Homo sapiens
agaatgtaccaaactggga

SEQ ID NO: 3156 - DNA, 19 bp, Homo sapiens
gaatgtaccaaactgggaa

SEQ ID NO: 3157 - DNA, 19 bp, Homo sapiens
aatgtaccaaactgggaaa

SEQ ID NO: 3158 - DNA, 19 bp, Homo sapiens
atgtaccaaactgggaaac

SEQ ID NO: 3159 - DNA, 19 bp, Homo sapiens
tgtaccaaactgggaaact

SEQ ID NO: 3160 - DNA, 19 bp, Homo sapiens
gtaccaaactgggaaactg

SEQ ID NO: 3161 - DNA, 19 bp, Homo sapiens
taccaaactgggaaactgg

SEQ ID NO: 3162 - DNA, 19 bp, Homo sapiens
accaaactgggaaactggt

SEQ ID NO: 3163 - DNA, 19 bp, Homo sapiens
ccaaactgggaaactggtc

SEQ ID NO: 3164 - DNA, 19 bp, Homo sapiens
caaactgggaaactggtct

SEQ ID NO: 3165 - DNA, 19 bp, Homo sapiens
aaactgggaaactggtctg

SEQ ID NO: 3166 - DNA, 19 bp, Homo sapiens
aactgggaaactggtctgc

SEQ ID NO: 3167 - DNA, 19 bp, Homo sapiens
actgggaaactggtctgcc

SEQ ID NO: 3168 - DNA, 19 bp, Homo sapiens
ctgggaaactggtctgcca

SEQ ID NO: 3169 - DNA, 19 bp, Homo sapiens
tgggaaactggtctgccat

SEQ ID NO: 3170 - DNA, 19 bp, Homo sapiens
gggaaactggtctgccatg

SEQ ID NO: 3171 - DNA, 19 bp, Homo sapiens
ggaaactggtctgccatgc

SEQ ID NO: 3172 - DNA, 19 bp, Homo sapiens
gaaactggtctgccatgcc

SEQ ID NO: 3173 - DNA, 19 bp, Homo sapiens
aaactggtctgccatgcca

SEQ ID NO: 3174 - DNA, 19 bp, Homo sapiens
aactggtctgccatgccaa

SEQ ID NO: 3175 - DNA, 19 bp, Homo sapiens
actggtctgccatgccaag

SEQ ID NO: 3176 - DNA, 19 bp, Homo sapiens
ctggtctgccatgccaagt

SEQ ID NO: 3177 - DNA, 19 bp, Homo sapiens
tggtctgccatgccaagtt

SEQ ID NO: 3178 - DNA, 19 bp, Homo sapiens
ggtctgccatgccaagttg

SEQ ID NO: 3179 - DNA, 19 bp, Homo sapiens
gtctgccatgccaagttgt

SEQ ID NO: 3180 - DNA, 19 bp, Homo sapiens
tctgccatgccaagttgta

SEQ ID NO: 3181 - DNA, 19 bp, Homo sapiens
ctgccatgccaagttgtaa

SEQ ID NO: 3182 - DNA, 19 bp, Homo sapiens
tgccatgccaagttgtaaa

SEQ ID NO: 3183 - DNA, 19 bp, Homo sapiens
gccatgccaagttgtaaag

SEQ ID NO: 3184 - DNA, 19 bp, Homo sapiens
ccatgccaagttgtaaagc

SEQ ID NO: 3185 - DNA, 19 bp, Homo sapiens
catgccaagttgtaaagca

SEQ ID NO: 3186 - DNA, 19 bp, Homo sapiens
atgccaagttgtaaagcat

SEQ ID NO: 3187 - DNA, 19 bp, Homo sapiens
tgccaagttgtaaagcatc

SEQ ID NO: 3188 - DNA, 19 bp, Homo sapiens
gccaagttgtaaagcatct

SEQ ID NO: 3189 - DNA, 19 bp, Homo sapiens
ccaagttgtaaagcatctt

SEQ ID NO: 3190 - DNA, 19 bp, Homo sapiens
caagttgtaaagcatcttg

SEQ ID NO: 3191 - DNA, 19 bp, Homo sapiens
aagttgtaaagcatcttgt

SEQ ID NO: 3192 - DNA, 19 bp, Homo sapiens
agttgtaaagcatcttgta

SEQ ID NO: 3193 - DNA, 19 bp, Homo sapiens
gttgtaaagcatcttgtaa

SEQ ID NO: 3194 - DNA, 19 bp, Homo sapiens
ttgtaaagcatcttgtaaa

SEQ ID NO: 3195 - DNA, 19 bp, Homo sapiens
tgtaaagcatcttgtaaag

SEQ ID NO: 3196 - DNA, 19 bp, Homo sapiens
gtaaagcatcttgtaaagt

SEQ ID NO: 3197 - DNA, 19 bp, Homo sapiens
taaagcatcttgtaaagta

SEQ ID NO: 3198 - DNA, 19 bp, Homo sapiens
aaagcatcttgtaaagtac

SEQ ID NO: 3199 - DNA, 19 bp, Homo sapiens
aagcatcttgtaaagtacc

SEQ ID NO: 3200 - DNA, 19 bp, Homo sapiens
agcatcttgtaaagtacct

SEQ ID NO: 3201 - DNA, 19 bp, Homo sapiens
gcatcttgtaaagtacctg

SEQ ID NO: 3202 - DNA, 19 bp, Homo sapiens
catcttgtaaagtacctgt

SEQ ID NO: 3203 - DNA, 19 bp, Homo sapiens
atcttgtaaagtacctgtg

SEQ ID NO: 3204 - DNA, 19 bp, Homo sapiens
tcttgtaaagtacctgtga

SEQ ID NO: 3205 - DNA, 19 bp, Homo sapiens
cttgtaaagtacctgtgaa

SEQ ID NO: 3206 - DNA, 19 bp, Homo sapiens
ttgtaaagtacctgtgaaa

SEQ ID NO: 3207 - DNA, 19 bp, Homo sapiens
tgtaaagtacctgtgaaaa

SEQ ID NO: 3208 - DNA, 19 bp, Homo sapiens
gtaaagtacctgtgaaaaa

SEQ ID NO: 3209 - DNA, 19 bp, Homo sapiens
taaagtacctgtgaaaaaa

SEQ ID NO: 3210 - DNA, 19 bp, Homo sapiens
aaagtacctgtgaaaaaag

SEQ ID NO: 3211 - DNA, 19 bp, Homo sapiens
aagtacctgtgaaaaaagc

SEQ ID NO: 3212 - DNA, 19 bp, Homo sapiens
agtacctgtgaaaaaagcc

SEQ ID NO: 3213 - DNA, 19 bp, Homo sapiens
gtacctgtgaaaaaagcca

SEQ ID NO: 3214 - DNA, 19 bp, Homo sapiens
tacctgtgaaaaaagccac

SEQ ID NO: 3215 - DNA, 19 bp, Homo sapiens
acctgtgaaaaaagccact

SEQ ID NO: 3216 - DNA, 19 bp, Homo sapiens
cctgtgaaaaaagccactg

SEQ ID NO: 3217 - DNA, 19 bp, Homo sapiens
ctgtgaaaaaagccactgt

SEQ ID NO: 3218 - DNA, 19 bp, Homo sapiens
tgtgaaaaaagccactgtg

SEQ ID NO: 3219 - DNA, 19 bp, Homo sapiens
gtgaaaaaagccactgtgg

SEQ ID NO: 3220 - DNA, 19 bp, Homo sapiens
tgaaaaaagccactgtggt

SEQ ID NO: 3221 - DNA, 19 bp, Homo sapiens
gaaaaaagccactgtggtg

SEQ ID NO: 3222 - DNA, 19 bp, Homo sapiens
aaaaaagccactgtggtgt

SEQ ID NO: 3223 - DNA, 19 bp, Homo sapiens
aaaaagccactgtggtgta

SEQ ID NO: 3224 - DNA, 19 bp, Homo sapiens
aaaagccactgtggtgtac

SEQ ID NO: 3225 - DNA, 19 bp, Homo sapiens
aaagccactgtggtgtacc

SEQ ID NO: 3226 - DNA, 19 bp, Homo sapiens
aagccactgtggtgtacca

SEQ ID NO: 3227 - DNA, 19 bp, Homo sapiens
agccactgtggtgtaccaa

SEQ ID NO: 3228 - DNA, 19 bp, Homo sapiens
gccactgtggtgtaccaag

SEQ ID NO: 3229 - DNA, 19 bp, Homo sapiens
ccactgtggtgtaccaagg

SEQ ID NO: 3230 - DNA, 19 bp, Homo sapiens
cactgtggtgtaccaagga

SEQ ID NO: 3231 - DNA, 19 bp, Homo sapiens
actgtggtgtaccaaggag

SEQ ID NO: 3232 - DNA, 19 bp, Homo sapiens
ctgtggtgtaccaaggaga

SEQ ID NO: 3233 - DNA, 19 bp, Homo sapiens
tgtggtgtaccaaggagag

SEQ ID NO: 3234 - DNA, 19 bp, Homo sapiens
gtggtgtaccaaggagaga

SEQ ID NO: 3235 - DNA, 19 bp, Homo sapiens
tggtgtaccaaggagagag

SEQ ID NO: 3236 - DNA, 19 bp, Homo sapiens
ggtgtaccaaggagagaga

SEQ ID NO: 3237 - DNA, 19 bp, Homo sapiens
gtgtaccaaggagagagag

SEQ ID NO: 3238 - DNA, 19 bp, Homo sapiens
tgtaccaaggagagagagt

SEQ ID NO: 3239 - DNA, 19 bp, Homo sapiens
gtaccaaggagagagagta

SEQ ID NO: 3240 - DNA, 19 bp, Homo sapiens
taccaaggagagagagtaa

SEQ ID NO: 3241 - DNA, 19 bp, Homo sapiens
accaaggagagagagtaaa

SEQ ID NO: 3242 - DNA, 19 bp, Homo sapiens
ccaaggagagagagtaaag

SEQ ID NO: 3243 - DNA, 19 bp, Homo sapiens
caaggagagagagtaaaga

SEQ ID NO: 3244 - DNA, 19 bp, Homo sapiens
aaggagagagagtaaagat

SEQ ID NO: 3245 - DNA, 19 bp, Homo sapiens
aggagagagagtaaagatt

SEQ ID NO: 3246 - DNA, 19 bp, Homo sapiens
ggagagagagtaaagattc

SEQ ID NO: 3247 - DNA, 19 bp, Homo sapiens
gagagagagtaaagattca

SEQ ID NO: 3248 - DNA, 19 bp, Homo sapiens
agagagagtaaagattcag

SEQ ID NO: 3249 - DNA, 19 bp, Homo sapiens
gagagagtaaagattcagg

SEQ ID NO: 3250 - DNA, 19 bp, Homo sapiens
agagagtaaagattcagga

SEQ ID NO: 3251 - DNA, 19 bp, Homo sapiens
gagagtaaagattcaggaa

SEQ ID NO: 3252 - DNA, 19 bp, Homo sapiens
agagtaaagattcaggaaa

SEQ ID NO: 3253 - DNA, 19 bp, Homo sapiens
gagtaaagattcaggaaaa

SEQ ID NO: 3254 - DNA, 19 bp, Homo sapiens
agtaaagattcaggaaaaa

SEQ ID NO: 3255 - DNA, 19 bp, Homo sapiens
gtaaagattcaggaaaaat

SEQ ID NO: 3256 - DNA, 19 bp, Homo sapiens
taaagattcaggaaaaatt

SEQ ID NO: 3257 - DNA, 19 bp, Homo sapiens
aaagattcaggaaaaattt

SEQ ID NO: 3258 - DNA, 19 bp, Homo sapiens
aagattcaggaaaaattta

SEQ ID NO: 3259 - DNA, 19 bp, Homo sapiens
agattcaggaaaaatttaa

SEQ ID NO: 3260 - DNA, 19 bp, Homo sapiens
gattcaggaaaaatttaag

SEQ ID NO: 3261 - DNA, 19 bp, Homo sapiens
attcaggaaaaatttaaga

SEQ ID NO: 3262 - DNA, 19 bp, Homo sapiens
ttcaggaaaaatttaagaa

SEQ ID NO: 3263 - DNA, 19 bp, Homo sapiens
tcaggaaaaatttaagaat

SEQ ID NO: 3264 - DNA, 19 bp, Homo sapiens
caggaaaaatttaagaatg

SEQ ID NO: 3265 - DNA, 19 bp, Homo sapiens
aggaaaaatttaagaatgg

SEQ ID NO: 3266 - DNA, 19 bp, Homo sapiens
ggaaaaatttaagaatgga

SEQ ID NO: 3267 - DNA, 19 bp, Homo sapiens
gaaaaatttaagaatggaa

SEQ ID NO: 3268 - DNA, 19 bp, Homo sapiens
aaaaatttaagaatggaat

SEQ ID NO: 3269 - DNA, 19 bp, Homo sapiens
aaaatttaagaatggaatg

SEQ ID NO: 3270 - DNA, 19 bp, Homo sapiens
aaatttaagaatggaatgc

SEQ ID NO: 3271 - DNA, 19 bp, Homo sapiens
aatttaagaatggaatgct

SEQ ID NO: 3272 - DNA, 19 bp, Homo sapiens
atttaagaatggaatgcta

SEQ ID NO: 3273 - DNA, 19 bp, Homo sapiens
tttaagaatggaatgctac

SEQ ID NO: 3274 - DNA, 19 bp, Homo sapiens
ttaagaatggaatgctaca

SEQ ID NO: 3275 - DNA, 19 bp, Homo sapiens
taagaatggaatgctacat

SEQ ID NO: 3276 - DNA, 19 bp, Homo sapiens
aagaatggaatgctacatg

SEQ ID NO: 3277 - DNA, 19 bp, Homo sapiens
agaatggaatgctacatgg

SEQ ID NO: 3278 - DNA, 19 bp, Homo sapiens
gaatggaatgctacatggt

SEQ ID NO: 3279 - DNA, 19 bp, Homo sapiens
aatggaatgctacatggtg

SEQ ID NO: 3280 - DNA, 19 bp, Homo sapiens
atggaatgctacatggtga

SEQ ID NO: 3281 - DNA, 19 bp, Homo sapiens
tggaatgctacatggtgat

SEQ ID NO: 3282 - DNA, 19 bp, Homo sapiens
ggaatgctacatggtgata

SEQ ID NO: 3283 - DNA, 19 bp, Homo sapiens
gaatgctacatggtgataa

SEQ ID NO: 3284 - DNA, 19 bp, Homo sapiens
aatgctacatggtgataaa

SEQ ID NO: 3285 - DNA, 19 bp, Homo sapiens
atgctacatggtgataaag

SEQ ID NO: 3286 - DNA, 19 bp, Homo sapiens
tgctacatggtgataaagt

SEQ ID NO: 3287 - DNA, 19 bp, Homo sapiens
gctacatggtgataaagtt

SEQ ID NO: 3288 - DNA, 19 bp, Homo sapiens
ctacatggtgataaagttt

SEQ ID NO: 3289 - DNA, 19 bp, Homo sapiens
tacatggtgataaagtttc

SEQ ID NO: 3290 - DNA, 19 bp, Homo sapiens
acatggtgataaagtttct

SEQ ID NO: 3291 - DNA, 19 bp, Homo sapiens
catggtgataaagtttctt

SEQ ID NO: 3292 - DNA, 19 bp, Homo sapiens
atggtgataaagtttcttt

SEQ ID NO: 3293 - DNA, 19 bp, Homo sapiens
tggtgataaagtttctttc

SEQ ID NO: 3294 - DNA, 19 bp, Homo sapiens
ggtgataaagtttctttct

SEQ ID NO: 3295 - DNA, 19 bp, Homo sapiens
gtgataaagtttctttctt

SEQ ID NO: 3296 - DNA, 19 bp, Homo sapiens
tgataaagtttctttcttc

SEQ ID NO: 3297 - DNA, 19 bp, Homo sapiens
gataaagtttctttcttct

SEQ ID NO: 3298 - DNA, 19 bp, Homo sapiens
ataaagtttctttcttctg

SEQ ID NO: 3299 - DNA, 19 bp, Homo sapiens
taaagtttctttcttctgc

SEQ ID NO: 3300 - DNA, 19 bp, Homo sapiens
aaagtttctttcttctgca

SEQ ID NO: 3301 - DNA, 19 bp, Homo sapiens
aagtttctttcttctgcaa

SEQ ID NO: 3302 - DNA, 19 bp, Homo sapiens
agtttctttcttctgcaaa

SEQ ID NO: 3303 - DNA, 19 bp, Homo sapiens
gtttctttcttctgcaaaa

SEQ ID NO: 3304 - DNA, 19 bp, Homo sapiens
tttctttcttctgcaaaaa

SEQ ID NO: 3305 - DNA, 19 bp, Homo sapiens
ttctttcttctgcaaaaat

SEQ ID NO: 3306 - DNA, 19 bp, Homo sapiens
tctttcttctgcaaaaata

SEQ ID NO: 3307 - DNA, 19 bp, Homo sapiens
ctttcttctgcaaaaataa

SEQ ID NO: 3308 - DNA, 19 bp, Homo sapiens
tttcttctgcaaaaataag

SEQ ID NO: 3309 - DNA, 19 bp, Homo sapiens
ttcttctgcaaaaataagg

SEQ ID NO: 3310 - DNA, 19 bp, Homo sapiens
tcttctgcaaaaataagga

SEQ ID NO: 3311 - DNA, 19 bp, Homo sapiens
cttctgcaaaaataaggaa

SEQ ID NO: 3312 - DNA, 19 bp, Homo sapiens
ttctgcaaaaataaggaaa

SEQ ID NO: 3313 - DNA, 19 bp, Homo sapiens
tctgcaaaaataaggaaaa

SEQ ID NO: 3314 - DNA, 19 bp, Homo sapiens
ctgcaaaaataaggaaaag

SEQ ID NO: 3315 - DNA, 19 bp, Homo sapiens
tgcaaaaataaggaaaaga

SEQ ID NO: 3316 - DNA, 19 bp, Homo sapiens
gcaaaaataaggaaaagaa

SEQ ID NO: 3317 - DNA, 19 bp, Homo sapiens
caaaaataaggaaaagaag

SEQ ID NO: 3318 - DNA, 19 bp, Homo sapiens
aaaaataaggaaaagaagt

SEQ ID NO: 3319 - DNA, 19 bp, Homo sapiens
aaaataaggaaaagaagtg

SEQ ID NO: 3320 - DNA, 19 bp, Homo sapiens
aaataaggaaaagaagtgt

SEQ ID NO: 3321 - DNA, 19 bp, Homo sapiens
aataaggaaaagaagtgta

SEQ ID NO: 3322 - DNA, 19 bp, Homo sapiens
ataaggaaaagaagtgtag

SEQ ID NO: 3323 - DNA, 19 bp, Homo sapiens
taaggaaaagaagtgtagc

SEQ ID NO: 3324 - DNA, 19 bp, Homo sapiens
aaggaaaagaagtgtagct

SEQ ID NO: 3325 - DNA, 19 bp, Homo sapiens
aggaaaagaagtgtagcta

SEQ ID NO: 3326 - DNA, 19 bp, Homo sapiens
ggaaaagaagtgtagctat

SEQ ID NO: 3327 - DNA, 19 bp, Homo sapiens
gaaaagaagtgtagctata

SEQ ID NO: 3328 - DNA, 19 bp, Homo sapiens
aaaagaagtgtagctatac

SEQ ID NO: 3329 - DNA, 19 bp, Homo sapiens
aaagaagtgtagctataca

SEQ ID NO: 3330 - DNA, 19 bp, Homo sapiens
aagaagtgtagctatacag

SEQ ID NO: 3331 - DNA, 19 bp, Homo sapiens
agaagtgtagctatacaga

SEQ ID NO: 3332 - DNA, 19 bp, Homo sapiens
gaagtgtagctatacagag

SEQ ID NO: 3333 - DNA, 19 bp, Homo sapiens
aagtgtagctatacagagg

SEQ ID NO: 3334 - DNA, 19 bp, Homo sapiens
agtgtagctatacagagga

SEQ ID NO: 3335 - DNA, 19 bp, Homo sapiens
gtgtagctatacagaggat

SEQ ID NO: 3336 - DNA, 19 bp, Homo sapiens
tgtagctatacagaggatg

SEQ ID NO: 3337 - DNA, 19 bp, Homo sapiens
gtagctatacagaggatgc

SEQ ID NO: 3338 - DNA, 19 bp, Homo sapiens
tagctatacagaggatgct

SEQ ID NO: 3339 - DNA, 19 bp, Homo sapiens
agctatacagaggatgctc

SEQ ID NO: 3340 - DNA, 19 bp, Homo sapiens
gctatacagaggatgctca

SEQ ID NO: 3341 - DNA, 19 bp, Homo sapiens
ctatacagaggatgctcag

SEQ ID NO: 3342 - DNA, 19 bp, Homo sapiens
tatacagaggatgctcagt

SEQ ID NO: 3343 - DNA, 19 bp, Homo sapiens
atacagaggatgctcagtg

SEQ ID NO: 3344 - DNA, 19 bp, Homo sapiens
tacagaggatgctcagtgt

SEQ ID NO: 3345 - DNA, 19 bp, Homo sapiens
acagaggatgctcagtgta

SEQ ID NO: 3346 - DNA, 19 bp, Homo sapiens
cagaggatgctcagtgtat

SEQ ID NO: 3347 - DNA, 19 bp, Homo sapiens
agaggatgctcagtgtata

SEQ ID NO: 3348 - DNA, 19 bp, Homo sapiens
gaggatgctcagtgtatag

SEQ ID NO: 3349 - DNA, 19 bp, Homo sapiens
aggatgctcagtgtataga

SEQ ID NO: 3350 - DNA, 19 bp, Homo sapiens
ggatgctcagtgtatagat

SEQ ID NO: 3351 - DNA, 19 bp, Homo sapiens
gatgctcagtgtatagatg

SEQ ID NO: 3352 - DNA, 19 bp, Homo sapiens
atgctcagtgtatagatgg

SEQ ID NO: 3353 - DNA, 19 bp, Homo sapiens
tgctcagtgtatagatggc

SEQ ID NO: 3354 - DNA, 19 bp, Homo sapiens
gctcagtgtatagatggca

SEQ ID NO: 3355 - DNA, 19 bp, Homo sapiens
ctcagtgtatagatggcac

SEQ ID NO: 3356 - DNA, 19 bp, Homo sapiens
tcagtgtatagatggcact

SEQ ID NO: 3357 - DNA, 19 bp, Homo sapiens
cagtgtatagatggcacta

SEQ ID NO: 3358 - DNA, 19 bp, Homo sapiens
agtgtatagatggcactat

SEQ ID NO: 3359 - DNA, 19 bp, Homo sapiens
gtgtatagatggcactatc

SEQ ID NO: 3360 - DNA, 19 bp, Homo sapiens
tgtatagatggcactatcg

SEQ ID NO: 3361 - DNA, 19 bp, Homo sapiens
gtatagatggcactatcga

SEQ ID NO: 3362 - DNA, 19 bp, Homo sapiens
tatagatggcactatcgaa

SEQ ID NO: 3363 - DNA, 19 bp, Homo sapiens
atagatggcactatcgaag

SEQ ID NO: 3364 - DNA, 19 bp, Homo sapiens
tagatggcactatcgaagt

SEQ ID NO: 3365 - DNA, 19 bp, Homo sapiens
agatggcactatcgaagtc

SEQ ID NO: 3366 - DNA, 19 bp, Homo sapiens
gatggcactatcgaagtcc

SEQ ID NO: 3367 - DNA, 19 bp, Homo sapiens
atggcactatcgaagtccc

SEQ ID NO: 3368 - DNA, 19 bp, Homo sapiens
tggcactatcgaagtcccc

SEQ ID NO: 3369 - DNA, 19 bp, Homo sapiens
ggcactatcgaagtcccca

SEQ ID NO: 3370 - DNA, 19 bp, Homo sapiens
gcactatcgaagtccccaa

SEQ ID NO: 3371 - DNA, 19 bp, Homo sapiens
cactatcgaagtccccaaa

SEQ ID NO: 3372 - DNA, 19 bp, Homo sapiens
actatcgaagtccccaaat

SEQ ID NO: 3373 - DNA, 19 bp, Homo sapiens
ctatcgaagtccccaaatg

SEQ ID NO: 3374 - DNA, 19 bp, Homo sapiens
tatcgaagtccccaaatgc

SEQ ID NO: 3375 - DNA, 19 bp, Homo sapiens
atcgaagtccccaaatgct

SEQ ID NO: 3376 - DNA, 19 bp, Homo sapiens
tcgaagtccccaaatgctt

SEQ ID NO: 3377 - DNA, 19 bp, Homo sapiens
cgaagtccccaaatgcttc

SEQ ID NO: 3378 - DNA, 19 bp, Homo sapiens
gaagtccccaaatgcttca

SEQ ID NO: 3379 - DNA, 19 bp, Homo sapiens
aagtccccaaatgcttcaa

SEQ ID NO: 3380 - DNA, 19 bp, Homo sapiens
agtccccaaatgcttcaag

SEQ ID NO: 3381 - DNA, 19 bp, Homo sapiens
gtccccaaatgcttcaagg

SEQ ID NO: 3382 - DNA, 19 bp, Homo sapiens
tccccaaatgcttcaagga

SEQ ID NO: 3383 - DNA, 19 bp, Homo sapiens
ccccaaatgcttcaaggaa

SEQ ID NO: 3384 - DNA, 19 bp, Homo sapiens
cccaaatgcttcaaggaac

SEQ ID NO: 3385 - DNA, 19 bp, Homo sapiens
ccaaatgcttcaaggaaca

SEQ ID NO: 3386 - DNA, 19 bp, Homo sapiens
caaatgcttcaaggaacac

SEQ ID NO: 3387 - DNA, 19 bp, Homo sapiens
aaatgcttcaaggaacaca

SEQ ID NO: 3388 - DNA, 19 bp, Homo sapiens
aatgcttcaaggaacacag

SEQ ID NO: 3389 - DNA, 19 bp, Homo sapiens
atgcttcaaggaacacagt

SEQ ID NO: 3390 - DNA, 19 bp, Homo sapiens
tgcttcaaggaacacagtt

SEQ ID NO: 3391 - DNA, 19 bp, Homo sapiens
gcttcaaggaacacagttc

SEQ ID NO: 3392 - DNA, 19 bp, Homo sapiens
cttcaaggaacacagttct

SEQ ID NO: 3393 - DNA, 19 bp, Homo sapiens
ttcaaggaacacagttctc

SEQ ID NO: 3394 - DNA, 19 bp, Homo sapiens
tcaaggaacacagttctct

SEQ ID NO: 3395 - DNA, 19 bp, Homo sapiens
caaggaacacagttctctg

SEQ ID NO: 3396 - DNA, 19 bp, Homo sapiens
aaggaacacagttctctgg

SEQ ID NO: 3397 - DNA, 19 bp, Homo sapiens
aggaacacagttctctggc

SEQ ID NO: 3398 - DNA, 19 bp, Homo sapiens
ggaacacagttctctggct

SEQ ID NO: 3399 - DNA, 19 bp, Homo sapiens
gaacacagttctctggctt

SEQ ID NO: 3400 - DNA, 19 bp, Homo sapiens
aacacagttctctggcttt

SEQ ID NO: 3401 - DNA, 19 bp, Homo sapiens
acacagttctctggctttt

SEQ ID NO: 3402 - DNA, 19 bp, Homo sapiens
cacagttctctggcttttt

SEQ ID NO: 3403 - DNA, 19 bp, Homo sapiens
acagttctctggctttttg

SEQ ID NO: 3404 - DNA, 19 bp, Homo sapiens
cagttctctggctttttgg

SEQ ID NO: 3405 - DNA, 19 bp, Homo sapiens
agttctctggctttttgga

SEQ ID NO: 3406 - DNA, 19 bp, Homo sapiens
gttctctggctttttggaa

SEQ ID NO: 3407 - DNA, 19 bp, Homo sapiens
ttctctggctttttggaaa

SEQ ID NO: 3408 - DNA, 19 bp, Homo sapiens
tctctggctttttggaaaa

SEQ ID NO: 3409 - DNA, 19 bp, Homo sapiens
ctctggctttttggaaaac

SEQ ID NO: 3410 - DNA, 19 bp, Homo sapiens
tctggctttttggaaaact

SEQ ID NO: 3411 - DNA, 19 bp, Homo sapiens
ctggctttttggaaaactg

SEQ ID NO: 3412 - DNA, 19 bp, Homo sapiens
tggctttttggaaaactga

SEQ ID NO: 3413 - DNA, 19 bp, Homo sapiens
ggctttttggaaaactgat

SEQ ID NO: 3414 - DNA, 19 bp, Homo sapiens
gctttttggaaaactgatg

SEQ ID NO: 3415 - DNA, 19 bp, Homo sapiens
ctttttggaaaactgatgc

SEQ ID NO: 3416 - DNA, 19 bp, Homo sapiens
tttttggaaaactgatgca

SEQ ID NO: 3417 - DNA, 19 bp, Homo sapiens
ttttggaaaactgatgcat

SEQ ID NO: 3418 - DNA, 19 bp, Homo sapiens
tttggaaaactgatgcatc

SEQ ID NO: 3419 - DNA, 19 bp, Homo sapiens
ttggaaaactgatgcatcc

SEQ ID NO: 3420 - DNA, 19 bp, Homo sapiens
tggaaaactgatgcatccg

SEQ ID NO: 3421 - DNA, 19 bp, Homo sapiens
ggaaaactgatgcatccga

SEQ ID NO: 3422 - DNA, 19 bp, Homo sapiens
gaaaactgatgcatccgat

SEQ ID NO: 3423 - DNA, 19 bp, Homo sapiens
aaaactgatgcatccgatg

SEQ ID NO: 3424 - DNA, 19 bp, Homo sapiens
aaactgatgcatccgatgt

SEQ ID NO: 3425 - DNA, 19 bp, Homo sapiens
aactgatgcatccgatgta

SEQ ID NO: 3426 - DNA, 19 bp, Homo sapiens
actgatgcatccgatgtaa

SEQ ID NO: 3427 - DNA, 19 bp, Homo sapiens
ctgatgcatccgatgtaaa

SEQ ID NO: 3428 - DNA, 19 bp, Homo sapiens
tgatgcatccgatgtaaag

SEQ ID NO: 3429 - DNA, 19 bp, Homo sapiens
gatgcatccgatgtaaagc

SEQ ID NO: 3430 - DNA, 19 bp, Homo sapiens
atgcatccgatgtaaagcc

SEQ ID NO: 3431 - DNA, 19 bp, Homo sapiens
tgcatccgatgtaaagcca

SEQ ID NO: 3432 - DNA, 19 bp, Homo sapiens
gcatccgatgtaaagccat

SEQ ID NO: 3433 - DNA, 19 bp, Homo sapiens
catccgatgtaaagccatg

SEQ ID NO: 3434 - DNA, 19 bp, Homo sapiens
atccgatgtaaagccatgc

SEQ ID NO: 3435 - DNA, 19 bp, Homo sapiens
tccgatgtaaagccatgct

SEQ ID NO: 3436 - DNA, 19 bp, Homo sapiens
ccgatgtaaagccatgcta

SEQ ID NO: 3437 - DNA, 19 bp, Homo sapiens
cgatgtaaagccatgctaa

SEQ ID NO: 3438 - DNA, 19 bp, Homo sapiens
gatgtaaagccatgctaag

SEQ ID NO: 3439 - DNA, 19 bp, Homo sapiens
atgtaaagccatgctaagg

SEQ ID NO: 3440 - DNA, 19 bp, Homo sapiens
tgtaaagccatgctaaggt

SEQ ID NO: 3441 - DNA, 19 bp, Homo sapiens
gtaaagccatgctaaggtg

SEQ ID NO: 3442 - DNA, 19 bp, Homo sapiens
taaagccatgctaaggtgg

SEQ ID NO: 3443 - DNA, 19 bp, Homo sapiens
aaagccatgctaaggtggt

SEQ ID NO: 3444 - DNA, 19 bp, Homo sapiens
aagccatgctaaggtggtt

SEQ ID NO: 3445 - DNA, 19 bp, Homo sapiens
agccatgctaaggtggttt

SEQ ID NO: 3446 - DNA, 19 bp, Homo sapiens
gccatgctaaggtggtttt

SEQ ID NO: 3447 - DNA, 19 bp, Homo sapiens
ccatgctaaggtggttttc

SEQ ID NO: 3448 - DNA, 19 bp, Homo sapiens
catgctaaggtggttttca

SEQ ID NO: 3449 - DNA, 19 bp, Homo sapiens
atgctaaggtggttttcag

SEQ ID NO: 3450 - DNA, 19 bp, Homo sapiens
tgctaaggtggttttcaga

SEQ ID NO: 3451 - DNA, 19 bp, Homo sapiens
gctaaggtggttttcagat

SEQ ID NO: 3452 - DNA, 19 bp, Homo sapiens
ctaaggtggttttcagatt

SEQ ID NO: 3453 - DNA, 19 bp, Homo sapiens
taaggtggttttcagattc

SEQ ID NO: 3454 - DNA, 19 bp, Homo sapiens
aaggtggttttcagattcc

SEQ ID NO: 3455 - DNA, 19 bp, Homo sapiens
aggtggttttcagattcca

SEQ ID NO: 3456 - DNA, 19 bp, Homo sapiens
ggtggttttcagattccac

SEQ ID NO: 3457 - DNA, 19 bp, Homo sapiens
gtggttttcagattccaca

SEQ ID NO: 3458 - DNA, 19 bp, Homo sapiens
tggttttcagattccacac

SEQ ID NO: 3459 - DNA, 19 bp, Homo sapiens
ggttttcagattccacaca

SEQ ID NO: 3460 - DNA, 19 bp, Homo sapiens
gttttcagattccacacaa

SEQ ID NO: 3461 - DNA, 19 bp, Homo sapiens
ttttcagattccacacaaa

SEQ ID NO: 3462 - DNA, 19 bp, Homo sapiens
tttcagattccacacaaaa

SEQ ID NO: 3463 - DNA, 19 bp, Homo sapiens
ttcagattccacacaaaat

SEQ ID NO: 3464 - DNA, 19 bp, Homo sapiens
tcagattccacacaaaatg

SEQ ID NO: 3465 - DNA, 19 bp, Homo sapiens
cagattccacacaaaatgt

SEQ ID NO: 3466 - DNA, 19 bp, Homo sapiens
agattccacacaaaatgtc

SEQ ID NO: 3467 - DNA, 19 bp, Homo sapiens
gattccacacaaaatgtca

SEQ ID NO: 3468 - DNA, 19 bp, Homo sapiens
attccacacaaaatgtcac

SEQ ID NO: 3469 - DNA, 19 bp, Homo sapiens
ttccacacaaaatgtcaca

SEQ ID NO: 3470 - DNA, 19 bp, Homo sapiens
tccacacaaaatgtcacac

SEQ ID NO: 3471 - DNA, 19 bp, Homo sapiens
ccacacaaaatgtcacact

SEQ ID NO: 3472 - DNA, 19 bp, Homo sapiens
cacacaaaatgtcacactt

SEQ ID NO: 3473 - DNA, 19 bp, Homo sapiens
acacaaaatgtcacacttg

SEQ ID NO: 3474 - DNA, 19 bp, Homo sapiens
cacaaaatgtcacacttgt

SEQ ID NO: 3475 - DNA, 19 bp, Homo sapiens
acaaaatgtcacacttgtt

SEQ ID NO: 3476 - DNA, 19 bp, Homo sapiens
caaaatgtcacacttgttt

SEQ ID NO: 3477 - DNA, 19 bp, Homo sapiens
aaaatgtcacacttgtttc

SEQ ID NO: 3478 - DNA, 19 bp, Homo sapiens
aaatgtcacacttgtttct

SEQ ID NO: 3479 - DNA, 19 bp, Homo sapiens
aatgtcacacttgtttctt

SEQ ID NO: 3480 - DNA, 19 bp, Homo sapiens
atgtcacacttgtttcttg

SEQ ID NO: 3481 - DNA, 19 bp, Homo sapiens
tgtcacacttgtttcttgt

SEQ ID NO: 3482 - DNA, 19 bp, Homo sapiens
gtcacacttgtttcttgtt

SEQ ID NO: 3483 - DNA, 19 bp, Homo sapiens
tcacacttgtttcttgttc

SEQ ID NO: 3484 - DNA, 19 bp, Homo sapiens
cacacttgtttcttgttca

SEQ ID NO: 3485 - DNA, 19 bp, Homo sapiens
acacttgtttcttgttcat

SEQ ID NO: 3486 - DNA, 19 bp, Homo sapiens
cacttgtttcttgttcatc

SEQ ID NO: 3487 - DNA, 19 bp, Homo sapiens
acttgtttcttgttcatcc

SEQ ID NO: 3488 - DNA, 19 bp, Homo sapiens
cttgtttcttgttcatcca

SEQ ID NO: 3489 - DNA, 19 bp, Homo sapiens
ttgtttcttgttcatccaa

SEQ ID NO: 3490 - DNA, 19 bp, Homo sapiens
tgtttcttgttcatccaag

SEQ ID NO: 3491 - DNA, 19 bp, Homo sapiens
gtttcttgttcatccaagg

SEQ ID NO: 3492 - DNA, 19 bp, Homo sapiens
tttcttgttcatccaagga

SEQ ID NO: 3493 - DNA, 19 bp, Homo sapiens
ttcttgttcatccaaggaa

SEQ ID NO: 3494 - DNA, 19 bp, Homo sapiens
tcttgttcatccaaggaac

SEQ ID NO: 3495 - DNA, 19 bp, Homo sapiens
cttgttcatccaaggaacc

SEQ ID NO: 3496 - DNA, 19 bp, Homo sapiens
ttgttcatccaaggaacct

SEQ ID NO: 3497 - DNA, 19 bp, Homo sapiens
tgttcatccaaggaaccta

SEQ ID NO: 3498 - DNA, 19 bp, Homo sapiens
gttcatccaaggaacctaa

SEQ ID NO: 3499 - DNA, 19 bp, Homo sapiens
ttcatccaaggaacctaat

SEQ ID NO: 3500 - DNA, 19 bp, Homo sapiens
tcatccaaggaacctaatt

SEQ ID NO: 3501 - DNA, 19 bp, Homo sapiens
catccaaggaacctaattg

SEQ ID NO: 3502 - DNA, 19 bp, Homo sapiens
atccaaggaacctaattga

SEQ ID NO: 3503 - DNA, 19 bp, Homo sapiens
tccaaggaacctaattgaa

SEQ ID NO: 3504 - DNA, 19 bp, Homo sapiens
ccaaggaacctaattgaaa

SEQ ID NO: 3505 - DNA, 19 bp, Homo sapiens
caaggaacctaattgaaat

SEQ ID NO: 3506 - DNA, 19 bp, Homo sapiens
aaggaacctaattgaaatt

SEQ ID NO: 3507 - DNA, 19 bp, Homo sapiens
aggaacctaattgaaattt

SEQ ID NO: 3508 - DNA, 19 bp, Homo sapiens
ggaacctaattgaaattta

SEQ ID NO: 3509 - DNA, 19 bp, Homo sapiens
gaacctaattgaaatttaa

SEQ ID NO: 3510 - DNA, 19 bp, Homo sapiens
aacctaattgaaatttaaa

SEQ ID NO: 3511 - DNA, 19 bp, Homo sapiens
acctaattgaaatttaaaa

SEQ ID NO: 3512 - DNA, 19 bp, Homo sapiens
cctaattgaaatttaaaaa

SEQ ID NO: 3513 - DNA, 19 bp, Homo sapiens
ctaattgaaatttaaaaat

SEQ ID NO: 3514 - DNA, 19 bp, Homo sapiens
taattgaaatttaaaaata

SEQ ID NO: 3515 - DNA, 19 bp, Homo sapiens
aattgaaatttaaaaataa

SEQ ID NO: 3516 - DNA, 19 bp, Homo sapiens
attgaaatttaaaaataaa

SEQ ID NO: 3517 - DNA, 19 bp, Homo sapiens
ttgaaatttaaaaataaag

SEQ ID NO: 3518 - DNA, 19 bp, Homo sapiens
tgaaatttaaaaataaagc

SEQ ID NO: 3519 - DNA, 19 bp, Homo sapiens
gaaatttaaaaataaagct

SEQ ID NO: 3520 - DNA, 19 bp, Homo sapiens
aaatttaaaaataaagcta

SEQ ID NO: 3521 - DNA, 19 bp, Homo sapiens
aatttaaaaataaagctac

SEQ ID NO: 3522 - DNA, 19 bp, Homo sapiens
atttaaaaataaagctact

SEQ ID NO: 3523 - DNA, 19 bp, Homo sapiens
tttaaaaataaagctactg

SEQ ID NO: 3524 - DNA, 19 bp, Homo sapiens
ttaaaaataaagctactga

SEQ ID NO: 3525 - DNA, 19 bp, Homo sapiens
taaaaataaagctactgaa

SEQ ID NO: 3526 - DNA, 19 bp, Homo sapiens
aaaaataaagctactgaat

SEQ ID NO: 3527 - DNA, 19 bp, Homo sapiens
aaaataaagctactgaatt

SEQ ID NO: 3528 - DNA, 19 bp, Homo sapiens
aaataaagctactgaattt

SEQ ID NO: 3529 - DNA, 19 bp, Homo sapiens
aataaagctactgaattta

SEQ ID NO: 3530 - DNA, 19 bp, Homo sapiens
ataaagctactgaatttat

SEQ ID NO: 3531 - DNA, 19 bp, Homo sapiens
taaagctactgaatttatt

SEQ ID NO: 3532 - DNA, 19 bp, Homo sapiens
aaagctactgaatttattg

SEQ ID NO: 3533 - DNA, 19 bp, Homo sapiens
aagctactgaatttattgc

SEQ ID NO: 3534 - DNA, 19 bp, Homo sapiens
agctactgaatttattgcc

SEQ ID NO: 3535 - DNA, 19 bp, Homo sapiens
gctactgaatttattgccg

SEQ ID NO: 3536 - DNA, 19 bp, Homo sapiens
ctactgaatttattgccgc

SEQ ID NO: 3537 - DNA, 19 bp, Homo sapiens
tactgaatttattgccgca

SEQ ID NO: 3538 - DNA, 19 bp, Homo sapiens
actgaatttattgccgcac

SEQ ID NO: 3539 - DNA, 19 bp, Homo sapiens
ctgaatttattgccgcacc

SEQ ID NO: 3540 - DNA, 19 bp, Homo sapiens
tgaatttattgccgcaccc

SEQ ID NO: 3541 - RNA, 1216 nt, Homo sapiens
ggcucugucuuuuuagcagacgaaaaccacuuugguagugccagugugacucauccacaaugauuucuccagugcucaucuuguucucgaguuuucucugccauguugcuauugcaggacggaccugucccaagccagaugauuuaccauuuuccacaguggucccguuaaaaacauucuaugagccaggagaagagauuacguauuccugcaagccgggcuaugugucccgaggagggaugagaaaguuuaucugcccucucacaggacuguggcccaucaacacucugaaauguacacccagaguauguccuuuugcuggaaucuuagaaaauggagccguacgcuauacgacuuuugaauaucccaacacgaucaguuuuucuuguaacacuggguuuuaucugaauggcgcugauucugccaagugcacugaggaaggaaaauggagcccggagcuuccugucugugcucccaucaucugcccuccaccauccauaccuacguuugcaacacuucguguuuauaagccaucagcuggaaacaauucccucuaucgggacacagcaguuuuugaauguuugccacaacaugcgauguuuggaaaugauacaauuaccugcacgacacauggaaauuggacuaaauuaccagaaugcagggaaguaaaaugcccauucccaucaagaccagacaauggauuugugaacuauccugcaaaaccaacacuuuauuacaaggauaaagccacauuuggcugccaugauggauauucucuggauggcccggaagaaauagaauguaccaaacugggaaacuggucugccaugccaaguuguaaagcaucuuguaaaguaccugugaaaaaagccacugugguguaccaaggagagagaguaaagauucaggaaaaauuuaagaauggaaugcuacauggugauaaaguuucuuucuucugcaaaaauaaggaaaagaaguguagcuauacagaggaugcucaguguauagauggcacuaucgaaguccccaaaugcuucaaggaacacaguucucuggcuuuuuggaaaacugaugcauccgauguaaagccaugcuaaggugguuuucagauuccacacaaaaugucacacuuguuucuuguucauccaaggaaccuaauugaaauuuaaaaauaaagcuacugaauuuauugccgcacccaaaaaaaaaaaaaaaa

SEQ ID NO: 3542 - RNA, 21 nt, Artificial Sequence
  Synthetic siRNA sense strand against beta-2GPI
  modified_base (1)..(1): cm
  modified_base (2)..(2): um
  modified_base (4)..(5): cm
  modified_base (7)..(7): um
  modified_base (9)..(10): um
  modified_base (12)..(12): cm
  modified_base (13)..(13): um
  modified_base (15)..(16): um
  modified_base (18)..(18): cm
cugccauguugcuauugcagg

SEQ ID NO: 3543 - RNA, 21 nt, Artificial Sequence
  Synthetic siRNA sense strand against beta-2GPI
  modified_base (1)..(1): cm
  modified_base (2)..(2): um
  modified_base (4)..(5): cm
  modified_base (7)..(7): um
  modified_base (9)..(10): um
  modified_base (12)..(12): cm
  modified_base (13)..(13): um
  modified_base (15)..(16): um
  modified_base (18)..(18): cm
cugccauguugcuauugcagg

SEQ ID NO: 3544 - RNA, 21 nt, Artificial Sequence
  Synthetic siRNA sense strand against beta-2GPI
  modified_base (1)..(1): cm
  modified_base (2)..(2): um
  modified_base (4)..(5): cm
  modified_base (7)..(7): um
  modified_base (9)..(10): um
  modified_base (12)..(12): cm
  modified_base (13)..(13): um
  modified_base (15)..(16): um
  modified_base (18)..(18): cm
cugccauguugcuauugcagg

SEQ ID NO: 3545 - RNA, 21 nt, Artificial Sequence
  Synthetic siRNA sense strand against beta-2GPI
  modified_base (1)..(1): cm
  modified_base (2)..(2): um
  modified_base (4)..(5): cm
  modified_base (7)..(7): um
  modified_base (9)..(10): um
  modified_base (12)..(12): cm
  modified_base (13)..(13): um
  modified_base (15)..(16): um
  modified_base (18)..(18): cm
cugccauguugcuauugcagg

SEQ ID NO: 3546 - RNA, 21 nt, Artificial Sequence
  Synthetic siRNA sense strand against beta-2GPI
  modified_base (1)..(1): cm
  modified_base (2)..(2): um
  modified_base (3)..(3): gm
  modified_base (4)..(5): cm
  modified_base (6)..(6): 2'-O-methyladenosine
  modified_base (7)..(7): um
  modified_base (8)..(8): gm
  modified_base (9)..(10): um
  modified_base (11)..(11): gm
  modified_base (12)..(12): cm
  modified_base (13)..(13): um
  modified_base (14)..(14): 2'-O-methyladenosine
  modified_base (15)..(16): um
  modified_base (17)..(17): gm
  modified_base (18)..(18): cm
  modified_base (19)..(19): 2'-O-methyladenosine
  modified_base (20)..(21): gm
cugccauguugcuauugcagg

SEQ ID NO: 3547 - RNA, 21 nt, Artificial Sequence
  Synthetic siRNA sense strand against beta-2GPI
  modified_base (1)..(1): cm
  modified_base (2)..(2): um
  modified_base (3)..(3): gm
  modified_base (4)..(5): cm
  modified_base (6)..(6): 2'-O-methyladenosine
  modified_base (7)..(7): um
  modified_base (8)..(8): gm
  modified_base (9)..(10): um
  modified_base (11)..(11): gm
  modified_base (12)..(12): cm
  modified_base (13)..(13): um
  modified_base (14)..(14): 2'-O-methyladenosine
  modified_base (15)..(16): um
  modified_base (17)..(17): gm
  modified_base (18)..(18): cm
  modified_base (19)..(19): 2'-O-methyladenosine
  modified_base (20)..(21): gm
cugccauguugcuauugcagg

SEQ ID NO: 3548 - RNA, 21 nt, Artificial Sequence
  Synthetic siRNA sense strand against beta-2GPI
  modified_base (1)..(1): cm
  modified_base (2)..(2): um
  modified_base (3)..(3): gm
  modified_base (4)..(5): cm
  modified_base (6)..(6): 2'-O-methyladenosine
  modified_base (7)..(7): um
  modified_base (8)..(8): gm
  modified_base (9)..(10): um
  modified_base (11)..(11): gm
  modified_base (12)..(12): cm
  modified_base (13)..(13): um
  modified_base (14)..(14): 2'-O-methyladenosine
  modified_base (15)..(16): um
  modified_base (17)..(17): gm
  modified_base (18)..(18): cm
  modified_base (19)..(19): 2'-O-methyladenosine
  modified_base (20)..(21): gm
cugccauguugcuauugcagg

SEQ ID NO: 3549 - RNA, 21 nt, Artificial Sequence
  Synthetic siRNA sense strand against beta-2GPI
  modified_base (1)..(1): cm
  modified_base (2)..(2): um
  modified_base (4)..(5): cm
  modified_base (7)..(7): um
  modified_base (9)..(10): um
  modified_base (12)..(12): cm
  modified_base (13)..(13): um
  modified_base (15)..(16): um
  modified_base (18)..(18): cm
  modified_base (20)..(21): gm
cugccauguugcuauugcagg

SEQ ID NO: 3550 - RNA, 21 nt, Artificial Sequence
  Synthetic siRNA sense strand against beta-2GPI
  modified_base (1)..(1): cm
  modified_base (2)..(2): um
  modified_base (4)..(5): cm
  modified_base (7)..(7): um
  modified_base (9)..(10): um
  modified_base (12)..(12): cm
  modified_base (13)..(13): um
  modified_base (15)..(16): um
  modified_base (18)..(18): cm
  modified_base (20)..(21): gm
cugccauguugcuauugcagg

SEQ ID NO: 3551 - RNA, 21 nt, Artificial Sequence
  Synthetic siRNA sense strand against beta-2GPI
  modified_base (1)..(1): cm
  modified_base (2)..(2): um
  modified_base (4)..(5): cm
  modified_base (7)..(7): um
  modified_base (9)..(10): um
  modified_base (12)..(12): cm
  modified_base (13)..(13): um
  modified_base (15)..(16): um
  modified_base (18)..(18): cm
  modified_base (20)..(21): gm
cugccauguugcuauugcagg

SEQ ID NO: 3552 - RNA, 21 nt, Artificial Sequence
  Synthetic siRNA sense strand against beta-2GPI
  modified_base (1)..(1): cm
  modified_base (2)..(2): um
  modified_base (4)..(5): cm
  modified_base (7)..(7): um
  modified_base (9)..(10): um
  modified_base (12)..(12): cm
  modified_base (13)..(13): um
  modified_base (15)..(16): um
  modified_base (18)..(18): cm
  modified_base (20)..(21): gm
cugccauguugcuauugcagg

SEQ ID NO: 3553 - RNA, 21 nt, Artificial Sequence
  Synthetic siRNA sense strand against beta-2GPI
  modified_base (1)..(1): cm
  modified_base (2)..(2): um
  modified_base (4)..(5): cm
  modified_base (7)..(7): um
  modified_base (9)..(10): um
  modified_base (12)..(12): cm
  modified_base (13)..(13): um
  modified_base (15)..(16): um
  modified_base (18)..(18): cm
  modified_base (20)..(21): gm
cugccauguugcuauugcagg

SEQ ID NO: 3554 - RNA, 21 nt, Artificial Sequence
  Synthetic siRNA sense strand against beta-2GPI
  modified_base (4)..(5): cm
  modified_base (7)..(7): um
  modified_base (9)..(10): um
  modified_base (12)..(12): cm
  modified_base (13)..(13): um
  modified_base (15)..(16): um
  modified_base (18)..(18): cm
cugccauguugcuauugcagg

SEQ ID NO: 3555 - RNA, 21 nt, Artificial Sequence
  Synthetic siRNA sense strand against beta-2GPI
  modified_base (4)..(5): cm
  modified_base (7)..(7): um
  modified_base (9)..(10): um
  modified_base (12)..(12): cm
  modified_base (13)..(13): um
  modified_base (15)..(16): um
  modified_base (18)..(18): cm
cugccauguugcuauugcagg

SEQ ID NO: 3556 - RNA, 21 nt, Artificial Sequence
  Synthetic siRNA sense strand against beta-2GPI
  modified_base (4)..(5): cm
  modified_base (7)..(7): um
  modified_base (9)..(10): um
  modified_base (12)..(12): cm
  modified_base (13)..(13): um
  modified_base (15)..(16): um
  modified_base (18)..(18): cm
cugccauguugcuauugcagg

SEQ ID NO: 3557 - RNA, 21 nt, Artificial Sequence
  Synthetic siRNA sense strand against beta-2GPI
  modified_base (4)..(5): cm
  modified_base (7)..(7): um
  modified_base (9)..(10): um
  modified_base (12)..(12): cm
  modified_base (13)..(13): um
  modified_base (15)..(16): um
  modified_base (18)..(18): cm
cugccauguugcuauugcagg

SEQ ID NO: 3558 - RNA, 21 nt, Artificial Sequence
  Synthetic siRNA sense strand against beta-2GPI
  modified_base (4)..(5): cm
  modified_base (7)..(7): um
  modified_base (9)..(10): um
  modified_base (12)..(12): cm
  modified_base (13)..(13): um
  modified_base (15)..(16): um
  modified_base (18)..(18): cm
  modified_base (20)..(21): gm
cugccauguugcuauugcagg

SEQ ID NO: 3559 - RNA, 21 nt, Artificial Sequence
  Synthetic siRNA sense strand against beta-2GPI
  modified_base (4)..(5): cm
  modified_base (7)..(7): um
  modified_base (9)..(10): um
  modified_base (12)..(12): cm
  modified_base (13)..(13): um
  modified_base (15)..(16): um
  modified_base (18)..(18): cm
  modified_base (20)..(21): gm
cugccauguugcuauugcagg

SEQ ID NO: 3560 - RNA, 21 nt, Artificial Sequence
  siRNA sense strand against beta-2GPI
  Synthetic modified_base (4)..(5): cm
  modified_base (7)..(7): um
  modified_base (9)..(10): um
  modified_base (12)..(12): cm
  modified_base (13)..(13): um
  modified_base (15)..(16): um
  modified_base (18)..(18): cm
  modified_base (20)..(21): gm
cugccauguugcuauugcagg

SEQ ID NO: 3561 - RNA, 21 nt, Artificial Sequence
  Synthetic siRNA sense strand against beta-2GPI
  modified_base (4)..(5): cm
  modified_base (7)..(7): um
  modified_base (9)..(10): um
  modified_base (12)..(12): cm
  modified_base (13)..(13): um
  modified_base (15)..(16): um
  modified_base (18)..(18): cm
  modified_base (20)..(21): gm
cugccauguugcuauugcagg

SEQ ID NO: 3562 - RNA, 21 nt, Artificial Sequence
  Synthetic siRNA sense strand against beta-2GPI
  modified_base (3)..(3): gm
  modified_base (4)..(4): cm
  modified_base (7)..(7): um
  modified_base (9)..(10): um
  modified_base (12)..(12): cm
  modified_base (13)..(13): um
  modified_base (15)..(16): um
  modified_base (18)..(18): cm
  modified_base (20)..(21): gm
cugccauguugcuauugcagg

SEQ ID NO: 3563 - RNA, 21 nt, Artificial Sequence
  Synthetic siRNA sense strand against beta-2GPI
  modified_base (3)..(3): gm
  modified_base (4)..(4): cm
  modified_base (7)..(7): um
  modified_base (9)..(10): um
  modified_base (12)..(12): cm
  modified_base (13)..(13): um
  modified_base (15)..(16): um
  modified_base (18)..(18): cm
  modified_base (20)..(21): gm
cugccauguugcuauugcagg

SEQ ID NO: 3564 - RNA, 21 nt, Artificial Sequence
  Synthetic siRNA sense strand against beta-2GPI
  modified_base (3)..(3): gm
  modified_base (4)..(4): cm
  modified_base (7)..(7): um
  modified_base (9)..(10): um
  modified_base (12)..(12): cm
  modified_base (13)..(13): um
  modified_base (15)..(16): um
  modified_base (18)..(18): cm
  modified_base (20)..(21): gm
cugccauguugcuauugcagg

SEQ ID NO: 3565 - RNA, 21 nt, Artificial Sequence
  Synthetic siRNA sense strand against beta-2GPI
  modified_base (3)..(3): gm
  modified_base (4)..(4): cm
  modified_base (7)..(7): um
  modified_base (9)..(10): um
  modified_base (12)..(12): cm
  modified_base (13)..(13): um
  modified_base (15)..(16): um
  modified_base (18)..(18): cm
  modified_base (20)..(21): gm
cugccauguugcuauugcagg

SEQ ID NO: 3566 - RNA, 21 nt, Artificial Sequence
  Synthetic siRNA sense strand against beta-2GPI
  modified_base (1)..(2): cm
  modified_base (4)..(4): um
  modified_base (6)..(7): um
  modified_base (9)..(9): cm
  modified_base (10)..(10): um
  modified_base (12)..(13): um
  modified_base (15)..(15): cm
  modified_base (20)..(20): cm
ccauguugcuauugcaggacg

SEQ ID NO: 3567 - RNA, 21 nt, Artificial Sequence
  Synthetic siRNA sense strand against beta-2GPI
  modified_base (1)..(2): cm
  modified_base (4)..(4): um
  modified_base (6)..(7): um
  modified_base (9)..(9): cm
  modified_base (10)..(10): um
  modified_base (12)..(13): um
  modified_base (15)..(15): cm
  modified_base (20)..(20): cm
ccauguugcuauugcaggacg

SEQ ID NO: 3568 - RNA, 21 nt, Artificial Sequence
  Synthetic siRNA sense strand against beta-2GPI
  modified_base (1)..(2): cm
  modified_base (4)..(4): um
  modified_base (6)..(7): um
  modified_base (9)..(9): cm
  modified_base (10)..(10): um
  modified_base (12)..(13): um
  modified_base (15)..(15): cm
  modified_base (20)..(20): cm
ccauguugcuauugcaggacg

SEQ ID NO: 3569 - RNA, 21 nt, Artificial Sequence
  Synthetic siRNA sense strand against beta-2GPI
  modified_base (1)..(2): cm
  modified_base (4)..(4): um
  modified_base (6)..(7): um
  modified_base (9)..(9): cm
  modified_base (10)..(10): um
  modified_base (12)..(13): um
  modified_base (15)..(15): cm
  modified_base (20)..(20): cm
ccauguugcuauugcaggacg

SEQ ID NO: 3570 - RNA, 21 nt, Artificial Sequence
  Synthetic siRNA sense strand against beta-2GPI
  modified_base (1)..(2): cm
  modified_base (4)..(4): um
  modified_base (6)..(7): um
  modified_base (9)..(9): cm
  modified_base (10)..(10): um
  modified_base (12)..(13): um
  modified_base (15)..(15): cm
  modified_base (20)..(20): cm
ccauguugcuauugcaggacg

SEQ ID NO: 3571 - RNA, 21 nt, Artificial Sequence
  Synthetic siRNA sense strand against beta-2GPI
  modified_base (1)..(2): cm
  modified_base (3)..(3): 2'-O-methyladenosine
  modified_base (4)..(4): um
  modified_base (5)..(5): gm
  modified_base (6)..(7): um
  modified_base (8)..(8): gm
  modified_base (9)..(9): cm
  modified_base (10)..(10): um
  modified_base (11)..(11): 2'-O-methyladenosine
  modified_base (12)..(13): um
  modified_base (14)..(14): gm
  modified_base (15)..(15): cm
  modified_base (16)..(16): 2'-O-methyladenosine
  modified_base (17)..(18): gm
  modified_base (19)..(19): 2'-O-methyladenosine
  modified_base (20)..(20): cm
  modified_base (21)..(21): gm
ccauguugcuauugcaggacg

SEQ ID NO: 3572 - RNA, 21 nt, Artificial Sequence
  Synthetic siRNA sense strand against beta-2GPI
  modified_base (1)..(2): cm
  modified_base (3)..(3): 2'-O-methyladenosine
  modified_base (4)..(4): um
  modified_base (5)..(5): gm
  modified_base (6)..(7): um
  modified_base (8)..(8): gm
  modified_base (9)..(9): cm
  modified_base (10)..(10): um
  modified_base (11)..(11): 2'-O-methyladenosine
  modified_base (12)..(13): um
  modified_base (14)..(14): gm
  modified_base (15)..(15): cm
  modified_base (16)..(16): 2'-O-methyladenosine
  modified_base (17)..(18): gm
  modified_base (19)..(19): 2'-O-methyladenosine
  modified_base (20)..(20): cm
  modified_base (21)..(21): gm
ccauguugcuauugcaggacg

SEQ ID NO: 3573 - RNA, 21 nt, Artificial Sequence
  Synthetic siRNA sense strand against beta-2GPI
  modified_base (1)..(2): cm
  modified_base (3)..(3): 2'-O-methyladenosine
  modified_base (4)..(4): um
  modified_base (5)..(5): gm
  modified_base (6)..(7): um
  modified_base (8)..(8): gm
  modified_base (9)..(9): cm
  modified_base (10)..(10): um
  modified_base (11)..(11): 2'-O-methyladenosine
  modified_base (12)..(13): um
  modified_base (14)..(14): gm
  modified_base (15)..(15): cm
  modified_base (16)..(16): 2'-O-methyladenosine
  modified_base (17)..(18): gm
  modified_base (19)..(19): 2'-O-methyladenosine
  modified_base (20)..(20): cm
  modified_base (21)..(21): gm
ccauguugcuauugcaggacg

SEQ ID NO: 3574 - RNA, 21 nt, Artificial Sequence
  Synthetic siRNA sense strand against beta-2GPI
  modified_base (1)..(2): cm
  modified_base (3)..(3): 2'-O-methyladenosine
  modified_base (4)..(4): um
  modified_base (5)..(5): gm
  modified_base (6)..(7): um
  modified_base (8)..(8): gm
  modified_base (9)..(9): cm
  modified_base (10)..(10): um
  modified_base (11)..(11): 2'-O-methyladenosine
  modified_base (12)..(13): um
  modified_base (14)..(14): gm
  modified_base (15)..(15): cm
  modified_base (16)..(16): 2'-O-methyladenosine
  modified_base (17)..(18): gm
  modified_base (19)..(19): 2'-O-methyladenosine
  modified_base (20)..(20): cm
  modified_base (21)..(21): gm
ccauguugcuauugcaggacg

SEQ ID NO: 3575 - RNA, 21 nt, Artificial Sequence
  Synthetic siRNA sense strand against beta-2GPI
  modified_base (1)..(2): cm
  modified_base (3)..(3): 2'-O-methyladenosine
  modified_base (4)..(4): um
  modified_base (5)..(5): gm
  modified_base (6)..(7): um
  modified_base (8)..(8): gm
  modified_base (9)..(9): cm
  modified_base (10)..(10): um
  modified_base (11)..(11): 2'-O-methyladenosine
  modified_base (12)..(13): um
  modified_base (14)..(14): gm
  modified_base (15)..(15): cm
  modified_base (16)..(16): 2'-O-methyladenosine
  modified_base (17)..(18): gm
  modified_base (19)..(19): 2'-O-methyladenosine
  modified_base (20)..(20): cm
  modified_base (21)..(21): gm
ccauguugcuauugcaggacg

SEQ ID NO: 3576 - RNA, 21 nt, Artificial Sequence
  Synthetic siRNA sense strand against beta-2GPI
  modified_base (1)..(2): cm
  modified_base (4)..(4): um
  modified_base (6)..(7): um
  modified_base (9)..(9): cm
  modified_base (10)..(10): um
  modified_base (12)..(13): um
  modified_base (15)..(15): cm
  modified_base (20)..(20): cm
  modified_base (21)..(21): gm
ccauguugcuauugcaggacg

SEQ ID NO: 3577 - RNA, 21 nt, Artificial Sequence
  Synthetic siRNA sense strand against beta-2GPI
  modified_base (1)..(2): cm
  modified_base (4)..(4): um
  modified_base (6)..(7): um
  modified_base (9)..(9): cm
  modified_base (10)..(10): um
  modified_base (12)..(13): um
  modified_base (15)..(15): cm
  modified_base (20)..(20): cm
  modified_base (21)..(21): gm
ccauguugcuauugcaggacg

SEQ ID NO: 3578 - RNA, 21 nt, Artificial Sequence
  Synthetic siRNA sense strand against beta-2GPI
  modified_base (1)..(2): cm
  modified_base (4)..(4): um
  modified_base (6)..(7): um
  modified_base (9)..(9): cm
  modified_base (10)..(10): um
  modified_base (12)..(13): um
  modified_base (15)..(15): cm
  modified_base (20)..(20): cm
  modified_base (21)..(21): gm
ccauguugcuauugcaggacg

SEQ ID NO: 3579 - RNA, 21 nt, Artificial Sequence
  Synthetic siRNA sense strand against beta-2GPI
  modified_base (1)..(2): cm
  modified_base (4)..(4): um
  modified_base (6)..(7): um
  modified_base (9)..(9): cm
  modified_base (10)..(10): um
  modified_base (12)..(13): um
  modified_base (15)..(15): cm
  modified_base (20)..(20): cm
  modified_base (21)..(21): gm
ccauguugcuauugcaggacg

SEQ ID NO: 3580 - RNA, 21 nt, Artificial Sequence
  Synthetic siRNA sense strand against beta-2GPI
  modified_base (1)..(2): cm
  modified_base (4)..(4): um
  modified_base (6)..(7): um
  modified_base (9)..(9): cm
  modified_base (10)..(10): um
  modified_base (12)..(13): um
  modified_base (15)..(15): cm
  modified_base (20)..(20): cm
  modified_base (21)..(21): gm
ccauguugcuauugcaggacg

SEQ ID NO: 3581 - RNA, 21 nt, Artificial Sequence
  Synthetic siRNA sense strand against beta-2GPI
  modified_base (1)..(2): cm
  modified_base (3)..(3): 2'-O-methyladenosine
  modified_base (4)..(4): um
  modified_base (5)..(5): gm
  modified_base (6)..(7): um
  modified_base (8)..(8): gm
  modified_base (9)..(9): cm
  modified_base (10)..(10): um
  modified_base (11)..(11): 2'-O-methyladenosine
  modified_base (12)..(13): um
  modified_base (14)..(14): gm
  modified_base (15)..(15): cm
  modified_base (16)..(16): 2'-O-methyladenosine
  modified_base (17)..(18): gm
  modified_base (19)..(19): 2'-O-methyladenosine
  modified_base (20)..(20): cm
  modified_base (21)..(21): gm
ccauguugcuauugcaggacg

SEQ ID NO: 3582 - RNA, 21 nt, Artificial Sequence
  Synthetic siRNA sense strand against beta-2GPI
  modified_base (1)..(2): cm
  modified_base (3)..(3): 2'-O-methyladenosine
  modified_base (4)..(4): um
  modified_base (5)..(5): gm
  modified_base (6)..(7): um
  modified_base (8)..(8): gm
  modified_base (9)..(9): cm
  modified_base (10)..(10): um
  modified_base (11)..(11): 2'-O-methyladenosine
  modified_base (12)..(13): um
  modified_base (14)..(14): gm
  modified_base (15)..(15): cm
  modified_base (16)..(16): 2'-O-methyladenosine
  modified_base (17)..(18): gm
  modified_base (19)..(19): 2'-O-methyladenosine
  modified_base (20)..(20): cm
  modified_base (21)..(21): gm
ccauguugcuauugcaggacg

SEQ ID NO: 3583 - RNA, 21 nt, Artificial Sequence
  Synthetic siRNA sense strand against beta-2GPI
  modified_base (1)..(2): cm
  modified_base (3)..(3): 2'-O-methyladenosine
  modified_base (4)..(4): um
  modified_base (5)..(5): gm
  modified_base (6)..(7): um
  modified_base (8)..(8): gm
  modified_base (9)..(9): cm
  modified_base (10)..(10): um
  modified_base (11)..(11): 2'-O-methyladenosine
  modified_base (12)..(13): um
  modified_base (14)..(14): gm
  modified_base (15)..(15): cm
  modified_base (16)..(16): 2'-O-methyladenosine
  modified_base (17)..(18): gm
  modified_base (19)..(19): 2'-O-methyladenosine
  modified_base (20)..(20): cm
  modified_base (21)..(21): gm
ccauguugcuauugcaggacg

SEQ ID NO: 3584 - RNA, 21 nt, Artificial Sequence
  Synthetic siRNA sense strand against beta-2GPI
  modified_base (1)..(2): cm
  modified_base (3)..(3): 2'-O-methyladenosine
  modified_base (4)..(4): um
  modified_base (5)..(5): gm
  modified_base (6)..(7): um
  modified_base (8)..(8): gm
  modified_base (9)..(9): cm
  modified_base (10)..(10): um
  modified_base (11)..(11): 2'-O-methyladenosine
  modified_base (12)..(13): um
  modified_base (14)..(14): gm
  modified_base (15)..(15): cm
  modified_base (16)..(16): 2'-O-methyladenosine
  modified_base (17)..(18): gm
  modified_base (19)..(19): 2'-O-methyladenosine
  modified_base (20)..(20): cm
  modified_base (21)..(21): gm
ccauguugcuauugcaggacg

SEQ ID NO: 3585 - RNA, 21 nt, Artificial Sequence
  Synthetic siRNA sense strand against beta-2GPI
  modified_base (1)..(2): cm
  modified_base (3)..(3): 2'-O-methyladenosine
  modified_base (4)..(4): um
  modified_base (5)..(5): gm
  modified_base (6)..(7): um
  modified_base (8)..(8): gm
  modified_base (9)..(9): cm
  modified_base (10)..(10): um
  modified_base (11)..(11): 2'-O-methyladenosine
  modified_base (12)..(13): um
  modified_base (14)..(14): gm
  modified_base (15)..(15): cm
  modified_base (16)..(16): 2'-O-methyladenosine
  modified_base (17)..(18): gm
  modified_base (19)..(19): 2'-O-methyladenosine
  modified_base (20)..(20): cm
  modified_base (21)..(21): gm
ccauguugcuauugcaggacg

SEQ ID NO: 3586 - RNA, 21 nt, Artificial Sequence
  Synthetic siRNA sense strand against beta-2GPI
  modified_base (1)..(2): cm
  modified_base (3)..(3): 2'-O-methyladenosine
  modified_base (4)..(4): um
  modified_base (5)..(5): gm
  modified_base (6)..(7): um
  modified_base (8)..(8): gm
  modified_base (9)..(9): cm
  modified_base (10)..(10): um
  modified_base (11)..(11): 2'-O-methyladenosine
  modified_base (12)..(13): um
  modified_base (14)..(14): gm
  modified_base (15)..(15): cm
  modified_base (16)..(16): 2'-O-methyladenosine
  modified_base (17)..(18): gm
  modified_base (19)..(19): 2'-O-methyladenosine
  modified_base (20)..(20): cm
  modified_base (21)..(21): gm
ccauguugcuauugcaggacg

SEQ ID NO: 3587 - RNA, 21 nt, Artificial Sequence
  Synthetic siRNA sense strand against beta-2GPI
  modified_base (1)..(2): cm
  modified_base (3)..(3): 2'-O-methyladenosine
  modified_base (4)..(4): um
  modified_base (5)..(5): gm
  modified_base (6)..(7): um
  modified_base (8)..(8): gm
  modified_base (9)..(9): cm
  modified_base (10)..(10): um
  modified_base (11)..(11): 2'-O-methyladenosine
  modified_base (12)..(13): um
  modified_base (14)..(14): gm
  modified_base (15)..(15): cm
  modified_base (16)..(16): 2'-O-methyladenosine
  modified_base (17)..(18): gm
  modified_base (19)..(19): 2'-O-methyladenosine
  modified_base (20)..(20): cm
  modified_base (21)..(21): gm
ccauguugcuauugcaggacg

SEQ ID NO: 3588 - RNA, 21 nt, Artificial Sequence
  Synthetic siRNA sense strand against beta-2GPI
  modified_base (1)..(2): cm
  modified_base (4)..(4): um
  modified_base (6)..(7): um
  modified_base (9)..(9): cm
  modified_base (10)..(10): um
  modified_base (12)..(13): um
  modified_base (15)..(15): cm
  modified_base (20)..(20): cm
  modified_base (21)..(21): gm
ccauguugcuauugcaggacg

SEQ ID NO: 3589 - RNA, 21 nt, Artificial Sequence
  Synthetic siRNA sense strand against beta-2GPI
  modified_base (1)..(2): cm
  modified_base (4)..(4): um
  modified_base (6)..(7): um
  modified_base (9)..(9): cm
  modified_base (10)..(10): um
  modified_base (12)..(13): um
  modified_base (15)..(15): cm
  modified_base (20)..(20): cm
  modified_base (21)..(21): gm
ccauguugcuauugcaggacg

SEQ ID NO: 3590 - RNA, 21 nt, Artificial Sequence
  Synthetic siRNA sense strand against beta-2GPI
  modified_base (1)..(2): cm
  modified_base (4)..(4): um
  modified_base (6)..(7): um
  modified_base (9)..(9): cm
  modified_base (10)..(10): um
  modified_base (12)..(13): um
  modified_base (15)..(15): cm
  modified_base (20)..(20): cm
  modified_base (21)..(21): gm
ccauguugcuauugcaggacg

SEQ ID NO: 3591 - RNA, 21 nt, Artificial Sequence
  Synthetic siRNA sense strand against beta-2GPI
  modified_base (1)..(2): cm
  modified_base (4)..(4): um
  modified_base (6)..(7): um
  modified_base (9)..(9): cm
  modified_base (10)..(10): um
  modified_base (12)..(13): um
  modified_base (15)..(15): cm
  modified_base (20)..(20): cm
  modified_base (21)..(21): gm
ccauguugcuauugcaggacg

SEQ ID NO: 3592 - RNA, 21 nt, Artificial Sequence
  Synthetic siRNA sense strand against beta-2GPI
  modified_base (1)..(2): cm
  modified_base (4)..(4): um
  modified_base (6)..(7): um
  modified_base (9)..(9): cm
  modified_base (10)..(10): um
  modified_base (12)..(13): um
  modified_base (15)..(15): cm
  modified_base (20)..(20): cm
  modified_base (21)..(21): gm
ccauguugcuauugcaggacg

SEQ ID NO: 3593 - RNA, 21 nt, Artificial Sequence
  Synthetic siRNA sense strand against beta-2GPI
  modified_base (1)..(2): cm
  modified_base (4)..(4): um
  modified_base (6)..(7): um
  modified_base (9)..(9): cm
  modified_base (10)..(10): um
  modified_base (12)..(13): um
  modified_base (15)..(15): cm
  modified_base (20)..(20): cm
  modified_base (21)..(21): gm
ccauguugcuauugcaggacg

SEQ ID NO: 3594 - RNA, 21 nt, Artificial Sequence
  Synthetic siRNA sense strand against beta-2GPI
  modified_base (1)..(2): cm
  modified_base (4)..(4): um
  modified_base (6)..(7): um
  modified_base (9)..(9): cm
  modified_base (10)..(10): um
  modified_base (12)..(13): um
  modified_base (15)..(15): cm
  modified_base (20)..(20): cm
  modified_base (21)..(21): gm
ccauguugcuauugcaggacg

SEQ ID NO: 3595 - RNA, 21 nt, Artificial Sequence
  Synthetic siRNA sense strand against beta-2GPI
  modified_base (2)..(2): um
  modified_base (3)..(5): cm
  modified_base (9)..(10): cm
  modified_base (14)..(14): um
  modified_base (17)..(19): um
  modified_base (21)..(21): cm
gucccaagccagaugauuuac

SEQ ID NO: 3596 - RNA, 21 nt, Artificial Sequence
  Synthetic siRNA sense strand against beta-2GPI
  modified_base (2)..(2): um
  modified_base (3)..(5): cm
  modified_base (9)..(10): cm
  modified_base (14)..(14): um
  modified_base (17)..(19): um
  modified_base (21)..(21): cm
gucccaagccagaugauuuac

SEQ ID NO: 3597 - RNA, 21 nt, Artificial Sequence
  Synthetic siRNA sense strand against beta-2GPI
  modified_base (2)..(2): um
  modified_base (3)..(5): cm
  modified_base (9)..(10): cm
  modified_base (14)..(14): um
  modified_base (17)..(19): um
  modified_base (21)..(21): cm
gucccaagccagaugauuuac

SEQ ID NO: 3598 - RNA, 21 nt, Artificial Sequence
  Synthetic siRNA sense strand against beta-2GPI
  modified_base (2)..(2): um
  modified_base (3)..(5): cm
  modified_base (9)..(10): cm
  modified_base (14)..(14): um
  modified_base (17)..(19): um
  modified_base (21)..(21): cm
gucccaagccagaugauuuac

SEQ ID NO: 3599 - RNA, 21 nt, Artificial Sequence
  Synthetic siRNA sense strand against beta-2GPI
  modified_base (1)..(1): gm
  modified_base (2)..(2): um
  modified_base (3)..(5): cm
  modified_base (6)..(7): 2'-O-methyladenosine
  modified_base (8)..(8): gm
  modified_base (9)..(10): cm
  modified_base (11)..(11): 2'-O-methyladenosine
  modified_base (12)..(12): gm
  modified_base (13)..(13): 2'-O-methyladenosine
  modified_base (14)..(14): um
  modified_base (15)..(15): gm
  modified_base (16)..(16): 2'-O-methyladenosine
  modified_base (17)..(19): um
  modified_base (20)..(20): 2'-O-methyladenosine
  modified_base (21)..(21): cm
gucccaagccagaugauuuac

SEQ ID NO: 3600 - RNA, 21 nt, Artificial Sequence
  Synthetic siRNA sense strand against beta-2GPI
  modified_base (2)..(2): um
  modified_base (3)..(5): cm
  modified_base (9)..(10): cm
  modified_base (14)..(14): um
  modified_base (17)..(19): um
  modified_base (20)..(20): 2'-O-methyladenosine
  modified_base (21)..(21): cm
gucccaagccagaugauuuac

SEQ ID NO: 3601 - RNA, 21 nt, Artificial Sequence
  Synthetic siRNA sense strand against beta-2GPI
  modified_base (2)..(2): um
  modified_base (3)..(5): cm
  modified_base (9)..(10): cm
  modified_base (14)..(14): um
  modified_base (17)..(19): um
  modified_base (20)..(20): 2'-O-methyladenosine
  modified_base (21)..(21): cm
gucccaagccagaugauuuac

SEQ ID NO: 3602 - RNA, 21 nt, Artificial Sequence
  Synthetic siRNA sense strand against beta-2GPI
  modified_base (2)..(2): um
  modified_base (3)..(5): cm
  modified_base (9)..(10): cm
  modified_base (14)..(14): um
  modified_base (17)..(19): um
  modified_base (20)..(20): 2'-O-methyladenosine
  modified_base (21)..(21): cm
gucccaagccagaugauuuac

SEQ ID NO: 3603 - RNA, 21 nt, Artificial Sequence
  Synthetic siRNA sense strand against beta-2GPI
  modified_base (2)..(2): um
  modified_base (3)..(5): cm
  modified_base (9)..(10): cm
  modified_base (14)..(14): um
  modified_base (17)..(19): um
  modified_base (20)..(20): 2'-O-methyladenosine
  modified_base (21)..(21): cm
gucccaagccagaugauuuac

SEQ ID NO: 3604 - RNA, 21 nt, Artificial Sequence
  Synthetic siRNA sense strand against beta-2GPI
  modified_base (2)..(2): um
  modified_base (3)..(5): cm
  modified_base (9)..(10): cm
  modified_base (14)..(14): um
  modified_base (17)..(19): um
  modified_base (20)..(20): 2'-O-methyladenosine
  modified_base (21)..(21): cm
gucccaagccagaugauuuac

SEQ ID NO: 3605 - RNA, 21 nt, Artificial Sequence
  Synthetic siRNA sense strand against beta-2GPI
  modified_base (1)..(1): um
  modified_base (2)..(4): cm
  modified_base (8)..(9): cm
  modified_base (13)..(13): um
  modified_base (16)..(18): um
  modified_base (20)..(21): cm
ucccaagccagaugauuuacc

SEQ ID NO: 3606 - RNA, 21 nt, Artificial Sequence
  Synthetic siRNA sense strand against beta-2GPI
  modified_base (1)..(1): um
  modified_base (2)..(4): cm
  modified_base (8)..(9): cm
  modified_base (13)..(13): um
  modified_base (16)..(18): um
  modified_base (20)..(21): cm
ucccaagccagaugauuuacc

SEQ ID NO: 3607 - RNA, 21 nt, Artificial Sequence
  Synthetic siRNA sense strand against beta-2GPI
  modified_base (1)..(1): um
  modified_base (2)..(4): cm
  modified_base (8)..(9): cm
  modified_base (13)..(13): um
  modified_base (16)..(18): um
  modified_base (20)..(21): cm
ucccaagccagaugauuuacc

SEQ ID NO: 3608 - RNA, 21 nt, Artificial Sequence
  Synthetic siRNA sense strand against beta-2GPI
  modified_base (1)..(1): um
  modified_base (2)..(4): cm
  modified_base (8)..(9): cm
  modified_base (13)..(13): um
  modified_base (16)..(18): um
  modified_base (20)..(21): cm
ucccaagccagaugauuuacc

SEQ ID NO: 3609 - RNA, 21 nt, Artificial Sequence
  Synthetic siRNA sense strand against beta-2GPI
  modified_base (1)..(1): um
  modified_base (2)..(4): cm
  modified_base (8)..(9): cm
  modified_base (13)..(13): um
  modified_base (16)..(18): um
  modified_base (20)..(21): cm
ucccaagccagaugauuuacc

SEQ ID NO: 3610 - RNA, 21 nt, Artificial Sequence
  Synthetic siRNA sense strand against beta-2GPI
  modified_base (1)..(1): um
  modified_base (2)..(4): cm
  modified_base (5)..(6): 2'-O-methyladenosine
  modified_base (7)..(7): gm
  modified_base (8)..(9): cm
  modified_base (10)..(10): 2'-O-methyladenosine
  modified_base (11)..(11): gm
  modified_base (12)..(12): 2'-O-methyladenosine
  modified_base (13)..(13): um
  modified_base (14)..(14): gm
  modified_base (15)..(15): 2'-O-methyladenosine
  modified_base (16)..(18): um
  modified_base (19)..(19): 2'-O-methyladenosine
  modified_base (20)..(21): cm
ucccaagccagaugauuuacc

SEQ ID NO: 3611 - RNA, 21 nt, Artificial Sequence
  Synthetic siRNA sense strand against beta-2GPI
  modified_base (1)..(1): um
  modified_base (2)..(4): cm
  modified_base (5)..(6): 2'-O-methyladenosine
  modified_base (7)..(7): gm
  modified_base (8)..(9): cm
  modified_base (10)..(10): 2'-O-methyladenosine
  modified_base (11)..(11): gm
  modified_base (12)..(12): 2'-O-methyladenosine
  modified_base (13)..(13): um
  modified_base (14)..(14): gm
  modified_base (15)..(15): 2'-O-methyladenosine
  modified_base (16)..(18): um
  modified_base (19)..(19): 2'-O-methyladenosine
  modified_base (20)..(21): cm
ucccaagccagaugauuuacc

SEQ ID NO: 3612 - RNA, 21 nt, Artificial Sequence
  Synthetic siRNA sense strand against beta-2GPI
  modified_base (1)..(1): um
  modified_base (2)..(4): cm
  modified_base (5)..(6): 2'-O-methyladenosine
  modified_base (7)..(7): gm
  modified_base (8)..(9): cm
  modified_base (10)..(10): 2'-O-methyladenosine
  modified_base (11)..(11): gm
  modified_base (12)..(12): 2'-O-methyladenosine
  modified_base (13)..(13): um
  modified_base (14)..(14): gm
  modified_base (15)..(15): 2'-O-methyladenosine
  modified_base (16)..(18): um
  modified_base (19)..(19): 2'-O-methyladenosine
  modified_base (20)..(21): cm
ucccaagccagaugauuuacc

SEQ ID NO: 3613 - RNA, 21 nt, Artificial Sequence
  Synthetic siRNA sense strand against beta-2GPI
  modified_base (1)..(1): um
  modified_base (2)..(4): cm
  modified_base (5)..(6): 2'-O-methyladenosine
  modified_base (7)..(7): gm
  modified_base (8)..(9): cm
  modified_base (10)..(10): 2'-O-methyladenosine
  modified_base (11)..(11): gm
  modified_base (12)..(12): 2'-O-methyladenosine
  modified_base (13)..(13): um
  modified_base (14)..(14): gm
  modified_base (15)..(15): 2'-O-methyladenosine
  modified_base (16)..(18): um
  modified_base (19)..(19): 2'-O-methyladenosine
  modified_base (20)..(21): cm
ucccaagccagaugauuuacc

SEQ ID NO: 3614 - RNA, 21 nt, Artificial Sequence
  Synthetic siRNA sense strand against beta-2GPI
  modified_base (1)..(1): um
  modified_base (2)..(4): cm
  modified_base (5)..(6): 2'-O-methyladenosine
  modified_base (7)..(7): gm
  modified_base (8)..(9): cm
  modified_base (10)..(10): 2'-O-methyladenosine
  modified_base (11)..(11): gm
  modified_base (12)..(12): 2'-O-methyladenosine
  modified_base (13)..(13): um
  modified_base (14)..(14): gm
  modified_base (15)..(15): 2'-O-methyladenosine
  modified_base (16)..(18): um
  modified_base (19)..(19): 2'-O-methyladenosine
  modified_base (20)..(21): cm
ucccaagccagaugauuuacc

SEQ ID NO: 3615 - RNA, 21 nt, Artificial Sequence
  Synthetic siRNA sense strand against beta-2GPI
  modified_base (1)..(1): cm
  modified_base (4)..(4): um
  modified_base (8)..(10): um
  modified_base (12)..(12): um
  modified_base (16)..(16): cm
  modified_base (17)..(17): um
  modified_base (19)..(19): um
  modified_base (20)..(21): cm
caauggauuugugaacuaucc

SEQ ID NO: 3616 - RNA, 21 nt, Artificial Sequence
  siRNA sense strand against beta-2GPI
  modified_base (1)..(1): cm
  modified_base (4)..(4): um
  modified_base (8)..(10): um
  modified_base (12)..(12): um
  modified_base (16)..(16): cm
  modified_base (17)..(17): um
  modified_base (19)..(19): um
  modified_base (20)..(21): cm
caauggauuugugaacuaucc

SEQ ID NO: 3617 - RNA, 21 nt, Artificial Sequence
  Synthetic siRNA sense strand against beta-2GPI
  modified_base (1)..(1): cm
  modified_base (4)..(4): um
  modified_base (8)..(10): um
  modified_base (12)..(12): um
  modified_base (16)..(16): cm
  modified_base (17)..(17): um
  modified_base (19)..(19): um
  modified_base (20)..(21): cm
caauggauuugugaacuaucc

SEQ ID NO: 3618 - RNA, 21 nt, Artificial Sequence
  Synthetic siRNA sense strand against beta-2GPI
  modified_base (1)..(1): cm
  modified_base (4)..(4): um
  modified_base (8)..(10): um
  modified_base (12)..(12): um
  modified_base (16)..(16): cm
  modified_base (17)..(17): um
  modified_base (19)..(19): um
  modified_base (20)..(21): cm
caauggauuugugaacuaucc

SEQ ID NO: 3619 - RNA, 21 nt, Artificial Sequence
  Synthetic siRNA sense strand against beta-2GPI
  modified_base (1)..(1): cm
  modified_base (4)..(4): um
  modified_base (8)..(10): um
  modified_base (12)..(12): um
  modified_base (16)..(16): cm
  modified_base (17)..(17): um
  modified_base (19)..(19): um
  modified_base (20)..(21): cm
caauggauuugugaacuaucc

SEQ ID NO: 3620 - RNA, 21 nt, Artificial Sequence
  Synthetic siRNA sense strand against beta-2GPI
  modified_base (1)..(1): cm
  modified_base (2)..(3): 2'-O-methyladenosine
  modified_base (4)..(4): um
  modified_base (5)..(6): gm
  modified_base (7)..(7): 2'-O-methyladenosine
  modified_base (8)..(10): um
  modified_base (11)..(11): gm
  modified_base (12)..(12): um
  modified_base (13)..(13): gm
  modified_base (14)..(15): 2'-O-methyladenosine
  modified_base (16)..(16): cm
  modified_base (17)..(17): um
  modified_base (18)..(18): 2'-O-methyladenosine
  modified_base (19)..(19): um
  modified_base (20)..(21): cm
caauggauuugugaacuaucc

SEQ ID NO: 3621 - RNA, 21 nt, Artificial Sequence
  Synthetic siRNA sense strand against beta-2GPI
  modified_base (1)..(1): cm
  modified_base (2)..(3): 2'-O-methyladenosine
  modified_base (4)..(4): um
  modified_base (5)..(6): gm
  modified_base (7)..(7): 2'-O-methyladenosine
  modified_base (8)..(10): um
  modified_base (11)..(11): gm
  modified_base (12)..(12): um
  modified_base (13)..(13): gm
  modified_base (14)..(15): 2'-O-methyladenosine
  modified_base (16)..(16): cm
  modified_base (17)..(17): um
  modified_base (18)..(18): 2'-O-methyladenosine
  modified_base (19)..(19): um
  modified_base (20)..(21): cm
caauggauuugugaacuaucc

SEQ ID NO: 3622 - RNA, 21 nt, Artificial Sequence
  Synthetic siRNA sense strand against beta-2GPI
  modified_base (1)..(1): cm
  modified_base (2)..(3): 2'-O-methyladenosine
  modified_base (4)..(4): um
  modified_base (5)..(6): gm
  modified_base (7)..(7): 2'-O-methyladenosine
  modified_base (8)..(10): um
  modified_base (11)..(11): gm
  modified_base (12)..(12): um
  modified_base (13)..(13): gm
  modified_base (14)..(15): 2'-O-methyladenosine
  modified_base (16)..(16): cm
  modified_base (17)..(17): um
  modified_base (18)..(18): 2'-O-methyladenosine
  modified_base (19)..(19): um
  modified_base (20)..(21): cm
caauggauuugugaacuaucc

SEQ ID NO: 3623 - RNA, 21 nt, Artificial Sequence
  Synthetic siRNA sense strand against beta-2GPI
  modified_base (1)..(1): cm
  modified_base (2)..(3): 2'-O-methyladenosine
  modified_base (4)..(4): um
  modified_base (5)..(6): gm
  modified_base (7)..(7): 2'-O-methyladenosine
  modified_base (8)..(10): um
  modified_base (11)..(11): gm
  modified_base (12)..(12): um
  modified_base (13)..(13): gm
  modified_base (14)..(15): 2'-O-methyladenosine
  modified_base (16)..(16): cm
  modified_base (17)..(17): um
  modified_base (18)..(18): 2'-O-methyladenosine
  modified_base (19)..(19): um
  modified_base (20)..(21): cm
caauggauuugugaacuaucc

SEQ ID NO: 3624 - RNA, 21 nt, Artificial Sequence
  Synthetic siRNA sense strand against beta-2GPI
  modified_base (1)..(1): cm
  modified_base (2)..(3): 2'-O-methyladenosine
  modified_base (4)..(4): um
  modified_base (5)..(6): gm
  modified_base (7)..(7): 2'-O-methyladenosine
  modified_base (8)..(10): um
  modified_base (11)..(11): gm
  modified_base (12)..(12): um
  modified_base (13)..(13): gm
  modified_base (14)..(15): 2'-O-methyladenosine
  modified_base (16)..(16): cm
  modified_base (17)..(17): um
  modified_base (18)..(18): 2'-O-methyladenosine
  modified_base (19)..(19): um
  modified_base (20)..(21): cm
caauggauuugugaacuaucc

SEQ ID NO: 3625 - RNA, 21 nt, Artificial Sequence
  Synthetic siRNA sense strand against beta-2GPI
  modified_base (1)..(1): cm
  modified_base (3)..(3): um
  modified_base (5)..(6): cm
  modified_base (10)..(11): um
  modified_base (13)..(13): um
  modified_base (18)..(18): cm
  modified_base (20)..(20): um
  modified_base (21)..(21): cm
caugccaaguuguaaagcauc

SEQ ID NO: 3626 - RNA, 21 nt, Artificial Sequence
  Synthetic siRNA sense strand against beta-2GPI
  modified_base (1)..(1): cm
  modified_base (3)..(3): um
  modified_base (5)..(6): cm
  modified_base (10)..(11): um
  modified_base (13)..(13): um
  modified_base (18)..(18): cm
  modified_base (20)..(20): um
  modified_base (21)..(21): cm
caugccaaguuguaaagcauc

SEQ ID NO: 3627 - RNA, 21 nt, Artificial Sequence
  Synthetic siRNA sense strand against beta-2GPI
  modified_base (1)..(1): cm
  modified_base (3)..(3): um
  modified_base (5)..(6): cm
  modified_base (10)..(11): um
  modified_base (13)..(13): um
  modified_base (18)..(18): cm
  modified_base (20)..(20): um
  modified_base (21)..(21): cm
caugccaaguuguaaagcauc

SEQ ID NO: 3628 - RNA, 21 nt, Artificial Sequence
  Synthetic siRNA sense strand against beta-2GPI
  modified_base (1)..(1): cm
  modified_base (3)..(3): um
  modified_base (5)..(6): cm
  modified_base (10)..(11): um
  modified_base (13)..(13): um
  modified_base (18)..(18): cm
  modified_base (20)..(20): um
  modified_base (21)..(21): cm
caugccaaguuguaaagcauc

SEQ ID NO: 3629 - RNA, 21 nt, Artificial Sequence
  Synthetic siRNA sense strand against beta-2GPI
  modified_base (1)..(1): cm
  modified_base (3)..(3): um
  modified_base (5)..(6): cm
  modified_base (10)..(11): um
  modified_base (13)..(13): um
  modified_base (18)..(18): cm
  modified_base (20)..(20): um
  modified_base (21)..(21): cm
caugccaaguuguaaagcauc

SEQ ID NO: 3630 - RNA, 21 nt, Artificial Sequence
  Synthetic siRNA sense strand against beta-2GPI
  modified_base (1)..(1): cm
  modified_base (2)..(2): 2'-O-methyladenosine
  modified_base (3)..(3): um
  modified_base (4)..(4): gm
  modified_base (5)..(6): cm
  modified_base (7)..(8): 2'-O-methyladenosine
  modified_base (9)..(9): gm
  modified_base (10)..(11): um
  modified_base (12)..(12): gm
  modified_base (13)..(13): um
  modified_base (14)..(16): 2'-O-methyladenosine
  modified_base (17)..(17): gm
  modified_base (18)..(18): cm
  modified_base (19)..(19): 2'-O-methyladenosine
  modified_base (20)..(20): um
  modified_base (21)..(21): cm
caugccaaguuguaaagcauc

SEQ ID NO: 3631 - RNA, 21 nt, Artificial Sequence
  Synthetic siRNA sense strand against beta-2GPI
  modified_base (1)..(1): cm
  modified_base (2)..(2): 2'-O-methyladenosine
  modified_base (3)..(3): um
  modified_base (4)..(4): gm
  modified_base (5)..(6): cm
  modified_base (7)..(8): 2'-O-methyladenosine
  modified_base (9)..(9): gm
  modified_base (10)..(11): um
  modified_base (12)..(12): gm
  modified_base (13)..(13): um
  modified_base (14)..(16): 2'-O-methyladenosine
  modified_base (17)..(17): gm
  modified_base (18)..(18): cm
  modified_base (19)..(19): 2'-O-methyladenosine
  modified_base (20)..(20): um
  modified_base (21)..(21): cm
caugccaaguuguaaagcauc

SEQ ID NO: 3632 - RNA, 21 nt, Artificial Sequence
  Synthetic siRNA sense strand against beta-2GPI
  modified_base (1)..(1): cm
  modified_base (2)..(2): 2'-O-methyladenosine
  modified_base (3)..(3): um
  modified_base (4)..(4): gm
  modified_base (5)..(6): cm
  modified_base (7)..(8): 2'-O-methyladenosine
  modified_base (9)..(9): gm
  modified_base (10)..(11): um
  modified_base (12)..(12): gm
  modified_base (13)..(13): um
  modified_base (14)..(16): 2'-O-methyladenosine
  modified_base (17)..(17): gm
  modified_base (18)..(18): cm
  modified_base (19)..(19): 2'-O-methyladenosine
  modified_base (20)..(20): um
  modified_base (21)..(21): cm
caugccaaguuguaaagcauc

SEQ ID NO: 3633 - RNA, 21 nt, Artificial Sequence
  Synthetic siRNA sense strand against beta-2GPI
  modified_base (2)..(2): um
  modified_base (4)..(5): cm
  modified_base (18)..(18): um
guaccaaggagagagaguaaa

SEQ ID NO: 3634 - RNA, 21 nt, Artificial Sequence
  Synthetic siRNA sense strand against beta-2GPI
  modified_base (2)..(2): um
  modified_base (4)..(5): cm
  modified_base (18)..(18): um
guaccaaggagagagaguaaa

SEQ ID NO: 3635 - RNA, 21 nt, Artificial Sequence
  Synthetic siRNA sense strand against beta-2GPI
  modified_base (2)..(2): um
  modified_base (4)..(5): cm
  modified_base (18)..(18): um
guaccaaggagagagaguaaa

SEQ ID NO: 3636 - RNA, 21 nt, Artificial Sequence
  Synthetic siRNA sense strand against beta-2GPI
  modified_base (2)..(2): um
  modified_base (4)..(5): cm
  modified_base (18)..(18): um
guaccaaggagagagaguaaa

SEQ ID NO: 3637 - RNA, 21 nt, Artificial Sequence
  Synthetic siRNA sense strand against beta-2GPI
  modified_base (2)..(2): um
  modified_base (4)..(5): cm
  modified_base (18)..(18): um
guaccaaggagagagaguaaa

SEQ ID NO: 3638 - RNA, 21 nt, Artificial Sequence
  Synthetic siRNA sense strand against beta-2GPI
  modified_base (1)..(1): gm
  modified_base (2)..(2): um
  modified_base (3)..(3): 2'-O-methyladenosine
  modified_base (4)..(5): cm
  modified_base (6)..(7): 2'-O-methyladenosine
  modified_base (8)..(9): gm
  modified_base (10)..(10): 2'-O-methyladenosine
  modified_base (11)..(11): gm
  modified_base (12)..(12): 2'-O-methyladenosine
  modified_base (13)..(13): gm
  modified_base (14)..(14): 2'-O-methyladenosine
  modified_base (15)..(15): gm
  modified_base (16)..(16): 2'-O-methyladenosine
  modified_base (17)..(17): gm
  modified_base (18)..(18): um
  modified_base (19)..(21): 2'-O-methyladenosine
guaccaaggagagagaguaaa

SEQ ID NO: 3639 - RNA, 21 nt, Artificial Sequence
  Synthetic siRNA sense strand against beta-2GPI
  modified_base (2)..(2): um
  modified_base (4)..(5): cm
  modified_base (18)..(18): um
  modified_base (20)..(21): 2'-O-methyladenosine
guaccaaggagagagaguaaa

SEQ ID NO: 3640 - RNA, 21 nt, Artificial Sequence
  Synthetic siRNA sense strand against beta-2GPI
  modified_base (2)..(2): um
  modified_base (4)..(5): cm
  modified_base (18)..(18): um
  modified_base (20)..(21): 2'-O-methyladenosine
guaccaaggagagagaguaaa

SEQ ID NO: 3641 - RNA, 21 nt, Artificial Sequence
  Synthetic siRNA sense strand against beta-2GPI
  modified_base (2)..(2): um
  modified_base (4)..(5): cm
  modified_base (18)..(18): um
  modified_base (20)..(21): 2'-O-methyladenosine
guaccaaggagagagaguaaa

SEQ ID NO: 3642 - RNA, 21 nt, Artificial Sequence
  Synthetic siRNA sense strand against beta-2GPI
  modified_base (2)..(2): um
  modified_base (4)..(5): cm
  modified_base (18)..(18): um
  modified_base (20)..(21): 2'-O-methyladenosine
guaccaaggagagagaguaaa

SEQ ID NO: 3643 - RNA, 21 nt, Artificial Sequence
  Synthetic siRNA sense strand against beta-2GPI
  modified_base (2)..(2): um
  modified_base (4)..(5): cm
  modified_base (18)..(18): um
  modified_base (20)..(21): 2'-O-methyladenosine
guaccaaggagagagaguaaa

SEQ ID NO: 3644 - RNA, 21 nt, Artificial Sequence
  Synthetic siRNA sense strand against beta-2GPI
  modified_base (2)..(4): um
  modified_base (5)..(5): cm
  modified_base (6)..(8): um
  modified_base (9)..(9): cm
  modified_base (10)..(11): um
  modified_base (12)..(12): cm
  modified_base (13)..(13): um
  modified_base (15)..(15): cm
  modified_base (21)..(21): um
guuucuuucuucugcaaaaau

SEQ ID NO: 3645 - RNA, 21 nt, Artificial Sequence
  Synthetic siRNA sense strand against beta-2GPI
  modified_base (2)..(4): um
  modified_base (5)..(5): cm
  modified_base (6)..(8): um
  modified_base (9)..(9): cm
  modified_base (10)..(11): um
  modified_base (12)..(12): cm
  modified_base (13)..(13): um
  modified_base (15)..(15): cm
  modified_base (21)..(21): um
guuucuuucuucugcaaaaau

SEQ ID NO: 3646 - RNA, 21 nt, Artificial Sequence
  Synthetic siRNA sense strand against beta-2GPI
  modified_base (2)..(4): um
  modified_base (5)..(5): cm
  modified_base (6)..(8): um
  modified_base (9)..(9): cm
  modified_base (10)..(11): um
  modified_base (12)..(12): cm
  modified_base (13)..(13): um
  modified_base (15)..(15): cm
  modified_base (21)..(21): um
guuucuuucuucugcaaaaau

SEQ ID NO: 3647 - RNA, 21 nt, Artificial Sequence
  Synthetic siRNA sense strand against beta-2GPI
  modified_base (2)..(4): um
  modified_base (5)..(5): cm
  modified_base (6)..(8): um
  modified_base (9)..(9): cm
  modified_base (10)..(11): um
  modified_base (12)..(12): cm
  modified_base (13)..(13): um
  modified_base (15)..(15): cm
  modified_base (21)..(21): um
guuucuuucuucugcaaaaau

SEQ ID NO: 3648 - RNA, 21 nt, Artificial Sequence
  Synthetic siRNA sense strand against beta-2GPI
  modified_base (2)..(4): um
  modified_base (5)..(5): cm
  modified_base (6)..(8): um
  modified_base (9)..(9): cm
  modified_base (10)..(11): um
  modified_base (12)..(12): cm
  modified_base (13)..(13): um
  modified_base (15)..(15): cm
  modified_base (21)..(21): um
guuucuuucuucugcaaaaau

SEQ ID NO: 3649 - RNA, 21 nt, Artificial Sequence
  Synthetic siRNA sense strand against beta-2GPI
  modified_base (1)..(1): gm
  modified_base (2)..(4): um
  modified_base (5)..(5): cm
  modified_base (6)..(8): um
  modified_base (9)..(9): cm
  modified_base (10)..(11): um
  modified_base (12)..(12): cm
  modified_base (13)..(13): um
  modified_base (14)..(14): gm
  modified_base (15)..(15): cm
  modified_base (16)..(20): 2'-O-methyladenosine
  modified_base (21)..(21): um
guuucuuucuucugcaaaaau

SEQ ID NO: 3650 - RNA, 21 nt, Artificial Sequence
  Synthetic siRNA sense strand against beta-2GPI
  modified_base (1)..(1): gm
  modified_base (2)..(4): um
  modified_base (5)..(5): cm
  modified_base (6)..(8): um
  modified_base (9)..(9): cm
  modified_base (10)..(11): um
  modified_base (12)..(12): cm
  modified_base (13)..(13): um
  modified_base (14)..(14): gm
  modified_base (15)..(15): cm
  modified_base (16)..(20): 2'-O-methyladenosine
  modified_base (21)..(21): um
guuucuuucuucugcaaaaau

SEQ ID NO: 3651 - RNA, 21 nt, Artificial Sequence
  Synthetic siRNA sense strand against beta-2GPI
  modified_base (1)..(1): gm
  modified_base (2)..(4): um
  modified_base (5)..(5): cm
  modified_base (6)..(8): um
  modified_base (9)..(9): cm
  modified_base (10)..(11): um
  modified_base (12)..(12): cm
  modified_base (13)..(13): um
  modified_base (14)..(14): gm
  modified_base (15)..(15): cm
  modified_base (16)..(20): 2'-O-methyladenosine
  modified_base (21)..(21): um
guuucuuucuucugcaaaaau

SEQ ID NO: 3652 - RNA, 21 nt, Artificial Sequence
  Synthetic siRNA sense strand against beta-2GPI
  modified_base (1)..(1): gm
  modified_base (2)..(4): um
  modified_base (5)..(5): cm
  modified_base (6)..(8): um
  modified_base (9)..(9): cm
  modified_base (10)..(11): um
  modified_base (12)..(12): cm
  modified_base (13)..(13): um
  modified_base (14)..(14): gm
  modified_base (15)..(15): cm
  modified_base (16)..(20): 2'-O-methyladenosine
  modified_base (21)..(21): um
guuucuuucuucugcaaaaau

SEQ ID NO: 3653 - RNA, 21 nt, Artificial Sequence
  Synthetic siRNA sense strand against beta-2GPI
  modified_base (1)..(1): gm
  modified_base (2)..(4): um
  modified_base (5)..(5): cm
  modified_base (6)..(8): um
  modified_base (9)..(9): cm
  modified_base (10)..(11): um
  modified_base (12)..(12): cm
  modified_base (13)..(13): um
  modified_base (14)..(14): gm
  modified_base (15)..(15): cm
  modified_base (16)..(20): 2'-O-methyladenosine
  modified_base (21)..(21): um
guuucuuucuucugcaaaaau

SEQ ID NO: 3654 - RNA, 21 nt, Artificial Sequence
  Synthetic siRNA sense strand against beta-2GPI
  modified_base (2)..(4): um
  modified_base (5)..(5): cm
  modified_base (6)..(8): um
  modified_base (9)..(9): cm
  modified_base (10)..(11): um
  modified_base (12)..(12): cm
  modified_base (13)..(13): um
  modified_base (15)..(15): cm
  modified_base (20)..(20): 2'-O-methyladenosine
  modified_base (21)..(21): um
guuucuuucuucugcaaaaau

SEQ ID NO: 3655 - RNA, 21 nt, Artificial Sequence
  Synthetic siRNA sense strand against beta-2GPI
  modified_base (2)..(4): um
  modified_base (5)..(5): cm
  modified_base (6)..(8): um
  modified_base (9)..(9): cm
  modified_base (10)..(11): um
  modified_base (12)..(12): cm
  modified_base (13)..(13): um
  modified_base (15)..(15): cm
  modified_base (20)..(20): 2'-O-methyladenosine
  modified_base (21)..(21): um
guuucuuucuucugcaaaaau

SEQ ID NO: 3656 - RNA, 21 nt, Artificial Sequence
  Synthetic siRNA sense strand against beta-2GPI
  modified_base (2)..(4): um
  modified_base (5)..(5): cm
  modified_base (6)..(8): um
  modified_base (9)..(9): cm
  modified_base (10)..(11): um
  modified_base (12)..(12): cm
  modified_base (13)..(13): um
  modified_base (15)..(15): cm
  modified_base (20)..(20): 2'-O-methyladenosine
  modified_base (21)..(21): um
guuucuuucuucugcaaaaau

SEQ ID NO: 3657 - RNA, 21 nt, Artificial Sequence
  Synthetic siRNA sense strand against beta-2GPI
  modified_base (2)..(4): um
  modified_base (5)..(5): cm
  modified_base (6)..(8): um
  modified_base (9)..(9): cm
  modified_base (10)..(11): um
  modified_base (12)..(12): cm
  modified_base (13)..(13): um
  modified_base (15)..(15): cm
  modified_base (20)..(20): 2'-O-methyladenosine
  modified_base (21)..(21): um
guuucuuucuucugcaaaaau

SEQ ID NO: 3658 - RNA, 21 nt, Artificial Sequence
  Synthetic siRNA sense strand against beta-2GPI
  modified_base (2)..(4): um
  modified_base (5)..(5): cm
  modified_base (6)..(8): um
  modified_base (9)..(9): cm
  modified_base (10)..(11): um
  modified_base (12)..(12): cm
  modified_base (13)..(13): um
  modified_base (15)..(15): cm
  modified_base (20)..(20): 2'-O-methyladenosine
  modified_base (21)..(21): um
guuucuuucuucugcaaaaau

SEQ ID NO: 3659 - RNA, 21 nt, Artificial Sequence
  Synthetic siRNA sense strand against beta-2GPI
  modified_base (1)..(2): cm
  modified_base (6)..(6): um
  modified_base (9)..(10): um
  modified_base (11)..(11): cm
  modified_base (18)..(18): cm
  modified_base (20)..(20): cm
ccaaaugcuucaaggaacaca

SEQ ID NO: 3660 - RNA, 21 nt, Artificial Sequence
  Synthetic siRNA sense strand against beta-2GPI
  modified_base (1)..(2): cm
  modified_base (6)..(6): um
  modified_base (9)..(10): um
  modified_base (11)..(11): cm
  modified_base (18)..(18): cm
  modified_base (20)..(20): cm
ccaaaugcuucaaggaacaca

SEQ ID NO: 3661 - RNA, 21 nt, Artificial Sequence
  Synthetic siRNA sense strand against beta-2GPI
  modified_base (1)..(2): cm
  modified_base (6)..(6): um
  modified_base (9)..(10): um
  modified_base (11)..(11): cm
  modified_base (18)..(18): cm
  modified_base (20)..(20): cm
ccaaaugcuucaaggaacaca

SEQ ID NO: 3662 - RNA, 21 nt, Artificial Sequence
  Synthetic siRNA sense strand against beta-2GPI
  modified_base (1)..(2): cm
  modified_base (6)..(6): um
  modified_base (9)..(10): um
  modified_base (11)..(11): cm
  modified_base (18)..(18): cm
  modified_base (20)..(20): cm
ccaaaugcuucaaggaacaca

SEQ ID NO: 3663 - RNA, 21 nt, Artificial Sequence
  Synthetic siRNA sense strand against beta-2GPI
  modified_base (1)..(2): cm
  modified_base (6)..(6): um
  modified_base (9)..(10): um
  modified_base (11)..(11): cm
  modified_base (18)..(18): cm
  modified_base (20)..(20): cm
ccaaaugcuucaaggaacaca

SEQ ID NO: 3664 - RNA, 21 nt, Artificial Sequence
  Synthetic siRNA sense strand against beta-2GPI
  modified_base (1)..(2): cm
  modified_base (3)..(5): 2'-O-methyladenosine
  modified_base (6)..(6): um
  modified_base (7)..(7): gm
  modified_base (8)..(8): cm
  modified_base (9)..(10): um
  modified_base (11)..(11): cm
  modified_base (12)..(13): 2'-O-methyladenosine
  modified_base (14)..(15): gm
  modified_base (16)..(17): 2'-O-methyladenosine
  modified_base (18)..(18): cm
  modified_base (19)..(19): 2'-O-methyladenosine
  modified_base (20)..(20): cm
  modified_base (21)..(21): 2'-O-methyladenosine
ccaaaugcuucaaggaacaca

SEQ ID NO: 3665 - RNA, 21 nt, Artificial Sequence
  Synthetic siRNA sense strand against beta-2GPI
  modified_base (1)..(2): cm
  modified_base (3)..(5): 2'-O-methyladenosine
  modified_base (6)..(6): um
  modified_base (7)..(7): gm
  modified_base (8)..(8): cm
  modified_base (9)..(10): um
  modified_base (11)..(11): cm
  modified_base (12)..(13): 2'-O-methyladenosine
  modified_base (14)..(15): gm
  modified_base (16)..(17): 2'-O-methyladenosine
  modified_base (18)..(18): cm
  modified_base (19)..(19): 2'-O-methyladenosine
  modified_base (20)..(20): cm
  modified_base (21)..(21): 2'-O-methyladenosine
ccaaaugcuucaaggaacaca

SEQ ID NO: 3666 - RNA, 21 nt, Artificial Sequence
  Synthetic siRNA sense strand against beta-2GPI
  modified_base (1)..(2): cm
  modified_base (3)..(5): 2'-O-methyladenosine
  modified_base (6)..(6): um
  modified_base (7)..(7): gm
  modified_base (8)..(8): cm
  modified_base (9)..(10): um
  modified_base (11)..(11): cm
  modified_base (12)..(13): 2'-O-methyladenosine
  modified_base (14)..(15): gm
  modified_base (16)..(17): 2'-O-methyladenosine
  modified_base (18)..(18): cm
  modified_base (19)..(19): 2'-O-methyladenosine
  modified_base (20)..(20): cm
  modified_base (21)..(21): 2'-O-methyladenosine
ccaaaugcuucaaggaacaca

SEQ ID NO: 3667 - RNA, 21 nt, Artificial Sequence
  Synthetic siRNA sense strand against beta-2GPI
  modified_base (1)..(2): cm
  modified_base (3)..(5): 2'-O-methyladenosine
  modified_base (6)..(6): um
  modified_base (7)..(7): gm
  modified_base (8)..(8): cm
  modified_base (9)..(10): um
  modified_base (11)..(11): cm
  modified_base (12)..(13): 2'-O-methyladenosine
  modified_base (14)..(15): gm
  modified_base (16)..(17): 2'-O-methyladenosine
  modified_base (18)..(18): cm
  modified_base (19)..(19): 2'-O-methyladenosine
  modified_base (20)..(20): cm
  modified_base (21)..(21): 2'-O-methyladenosine
ccaaaugcuucaaggaacaca

SEQ ID NO: 3668 - RNA, 21 nt, Artificial Sequence
  Synthetic siRNA sense strand against beta-2GPI
  modified_base (1)..(2): cm
  modified_base (3)..(5): 2'-O-methyladenosine
  modified_base (6)..(6): um
  modified_base (7)..(7): gm
  modified_base (8)..(8): cm
  modified_base (9)..(10): um
  modified_base (11)..(11): cm
  modified_base (12)..(13): 2'-O-methyladenosine
  modified_base (14)..(15): gm
  modified_base (16)..(17): 2'-O-methyladenosine
  modified_base (18)..(18): cm
  modified_base (19)..(19): 2'-O-methyladenosine
  modified_base (20)..(20): cm
  modified_base (21)..(21): 2'-O-methyladenosine
ccaaaugcuucaaggaacaca

SEQ ID NO: 3669 - RNA, 21 nt, Artificial Sequence
  Synthetic siRNA sense strand against beta-2GPI
  modified_base (1)..(2): cm
  modified_base (6)..(6): um
  modified_base (9)..(10): um
  modified_base (11)..(11): cm
  modified_base (18)..(18): cm
  modified_base (20)..(20): cm
  modified_base (21)..(21): 2'-O-methyladenosine
ccaaaugcuucaaggaacaca

SEQ ID NO: 3670 - RNA, 21 nt, Artificial Sequence
  Synthetic siRNA sense strand against beta-2GPI
  modified_base (1)..(2): cm
  modified_base (6)..(6): um
  modified_base (9)..(10): um
  modified_base (11)..(11): cm
  modified_base (18)..(18): cm
  modified_base (20)..(20): cm
  modified_base (21)..(21): 2'-O-methyladenosine
ccaaaugcuucaaggaacaca

SEQ ID NO: 3671 - RNA, 21 nt, Artificial Sequence
  Synthetic siRNA sense strand against beta-2GPI
  modified_base (1)..(2): cm
  modified_base (6)..(6): um
  modified_base (9)..(10): um
  modified_base (11)..(11): cm
  modified_base (18)..(18): cm
  modified_base (20)..(20): cm
  modified_base (21)..(21): 2'-O-methyladenosine
ccaaaugcuucaaggaacaca

SEQ ID NO: 3672 - RNA, 21 nt, Artificial Sequence
  Synthetic siRNA sense strand against beta-2GPI
  modified_base (1)..(2): cm
  modified_base (6)..(6): um
  modified_base (9)..(10): um
  modified_base (11)..(11): cm
  modified_base (18)..(18): cm
  modified_base (20)..(20): cm
  modified_base (21)..(21): 2'-O-methyladenosine
ccaaaugcuucaaggaacaca

SEQ ID NO: 3673 - RNA, 21 nt, Artificial Sequence
  Synthetic siRNA sense strand against beta-2GPI
  modified_base (5)..(5): cm
  modified_base (7)..(7): cm
  modified_base (10)..(11): um
  modified_base (12)..(12): cm
  modified_base (13)..(13): um
  modified_base (14)..(14): cm
  modified_base (15)..(15): um
  modified_base (18)..(18): cm
  modified_base (19)..(21): um
ggaacacaguucucuggcuuu

SEQ ID NO: 3674 - RNA, 21 nt, Artificial Sequence
  Synthetic siRNA sense strand against beta-2GPI
  modified_base (5)..(5): cm
  modified_base (7)..(7): cm
  modified_base (10)..(11): um
  modified_base (12)..(12): cm
  modified_base (13)..(13): um
  modified_base (14)..(14): cm
  modified_base (15)..(15): um
  modified_base (18)..(18): cm
  modified_base (19)..(21): um
ggaacacaguucucuggcuuu

SEQ ID NO: 3675 - RNA, 21 nt, Artificial Sequence
  Synthetic siRNA sense strand against beta-2GPI
  modified_base (5)..(5): cm
  modified_base (7)..(7): cm
  modified_base (10)..(11): um
  modified_base (12)..(12): cm
  modified_base (13)..(13): um
  modified_base (14)..(14): cm
  modified_base (15)..(15): um
  modified_base (18)..(18): cm
  modified_base (19)..(21): um
ggaacacaguucucuggcuuu

SEQ ID NO: 3676 - RNA, 21 nt, Artificial Sequence
  Synthetic siRNA sense strand against beta-2GPI
  modified_base (1)..(2): gm
  modified_base (3)..(4): 2'-O-methyladenosine
  modified_base (5)..(5): cm
  modified_base (6)..(6): 2'-O-methyladenosine
  modified_base (7)..(7): cm
  modified_base (8)..(8): 2'-O-methyladenosine
  modified_base (9)..(9): gm
  modified_base (10)..(11): um
  modified_base (12)..(12): cm
  modified_base (13)..(13): um
  modified_base (14)..(14): cm
  modified_base (15)..(15): um
  modified_base (16)..(17): gm
  modified_base (18)..(18): cm
  modified_base (19)..(21): um
ggaacacaguucucuggcuuu

SEQ ID NO: 3677 - RNA, 21 nt, Artificial Sequence
  Synthetic siRNA sense strand against beta-2GPI
  modified_base (1)..(2): gm
  modified_base (3)..(4): 2'-O-methyladenosine
  modified_base (5)..(5): cm
  modified_base (6)..(6): 2'-O-methyladenosine
  modified_base (7)..(7): cm
  modified_base (8)..(8): 2'-O-methyladenosine
  modified_base (9)..(9): gm
  modified_base (10)..(11): um
  modified_base (12)..(12): cm
  modified_base (13)..(13): um
  modified_base (14)..(14): cm
  modified_base (15)..(15): um
  modified_base (16)..(17): gm
  modified_base (18)..(18): cm
  modified_base (19)..(21): um
ggaacacaguucucuggcuuu

SEQ ID NO: 3678 - RNA, 21 nt, Artificial Sequence
  Synthetic siRNA sense strand against beta-2GPI
  modified_base (4)..(4): cm
  modified_base (6)..(6): cm
  modified_base (9)..(10): um
  modified_base (11)..(11): cm
  modified_base (12)..(12): um
  modified_base (13)..(13): cm
  modified_base (14)..(14): um
  modified_base (18)..(21): um
gaacacaguucucuggcuuuu

SEQ ID NO: 3679 - RNA, 21 nt, Artificial Sequence
  siRNA sense strand against beta-2GPI
  modified_base (4)..(4): cm
  modified_base (6)..(6): cm
  modified_base (9)..(10): um
  modified_base (11)..(11): cm
  modified_base (12)..(12): um
  modified_base (13)..(13): cm
  modified_base (14)..(14): um
  modified_base (18)..(21): um
gaacacaguucucuggcuuuu

SEQ ID NO: 3680 - RNA, 21 nt, Artificial Sequence
  Synthetic siRNA sense strand against beta-2GPI
  modified_base (4)..(4): cm
  modified_base (6)..(6): cm
  modified_base (9)..(10): um
  modified_base (11)..(11): cm
  modified_base (12)..(12): um
  modified_base (13)..(13): cm
  modified_base (14)..(14): um
  modified_base (18)..(21): um
gaacacaguucucuggcuuuu

SEQ ID NO: 3681 - RNA, 21 nt, Artificial Sequence
  Synthetic siRNA sense strand against beta-2GPI
  modified_base (4)..(4): cm
  modified_base (6)..(6): cm
  modified_base (9)..(10): um
  modified_base (11)..(11): cm
  modified_base (12)..(12): um
  modified_base (13)..(13): cm
  modified_base (14)..(14): um
  modified_base (18)..(21): um
gaacacaguucucuggcuuuu

SEQ ID NO: 3682 - RNA, 21 nt, Artificial Sequence
  Synthetic siRNA sense strand against beta-2GPI
  modified_base (4)..(4): cm
  modified_base (6)..(6): cm
  modified_base (9)..(10): um
  modified_base (11)..(11): cm
  modified_base (12)..(12): um
  modified_base (13)..(13): cm
  modified_base (14)..(14): um
  modified_base (18)..(21): um
gaacacaguucucuggcuuuu

SEQ ID NO: 3683 - RNA, 21 nt, Artificial Sequence
  Synthetic siRNA sense strand against beta-2GPI
  modified_base (1)..(1): gm
  modified_base (2)..(3): 2'-O-methyladenosine
  modified_base (4)..(4): cm
  modified_base (5)..(5): 2'-O-methyladenosine
  modified_base (6)..(6): cm
  modified_base (7)..(7): 2'-O-methyladenosine
  modified_base (8)..(8): gm
  modified_base (9)..(10): um
  modified_base (11)..(11): cm
  modified_base (12)..(12): um
  modified_base (13)..(13): cm
  modified_base (14)..(14): um
  modified_base (15)..(16): gm
  modified_base (17)..(17): cm
  modified_base (18)..(21): um
gaacacaguucucuggcuuuu

SEQ ID NO: 3684 - RNA, 21 nt, Artificial Sequence
  Synthetic siRNA sense strand against beta-2GPI
  modified_base (1)..(1): gm
  modified_base (2)..(3): 2'-O-methyladenosine
  modified_base (4)..(4): cm
  modified_base (5)..(5): 2'-O-methyladenosine
  modified_base (6)..(6): cm
  modified_base (7)..(7): 2'-O-methyladenosine
  modified_base (8)..(8): gm
  modified_base (9)..(10): um
  modified_base (11)..(11): cm
  modified_base (12)..(12): um
  modified_base (13)..(13): cm
  modified_base (14)..(14): um
  modified_base (15)..(16): gm
  modified_base (17)..(17): cm
  modified_base (18)..(21): um
gaacacaguucucuggcuuuu

SEQ ID NO: 3685 - RNA, 21 nt, Artificial Sequence
  Synthetic siRNA sense strand against beta-2GPI
  modified_base (1)..(1): gm
  modified_base (2)..(3): 2'-O-methyladenosine
  modified_base (4)..(4): cm
  modified_base (5)..(5): 2'-O-methyladenosine
  modified_base (6)..(6): cm
  modified_base (7)..(7): 2'-O-methyladenosine
  modified_base (8)..(8): gm
  modified_base (9)..(10): um
  modified_base (11)..(11): cm
  modified_base (12)..(12): um
  modified_base (13)..(13): cm
  modified_base (14)..(14): um
  modified_base (15)..(16): gm
  modified_base (17)..(17): cm
  modified_base (18)..(21): um
gaacacaguucucuggcuuuu

SEQ ID NO: 3686 - RNA, 21 nt, Artificial Sequence
  Synthetic siRNA sense strand against beta-2GPI
  modified_base (1)..(1): gm
  modified_base (2)..(3): 2'-O-methyladenosine
  modified_base (4)..(4): cm
  modified_base (5)..(5): 2'-O-methyladenosine
  modified_base (6)..(6): cm
  modified_base (7)..(7): 2'-O-methyladenosine
  modified_base (8)..(8): gm
  modified_base (9)..(10): um
  modified_base (11)..(11): cm
  modified_base (12)..(12): um
  modified_base (13)..(13): cm
  modified_base (14)..(14): um
  modified_base (15)..(16): gm
  modified_base (17)..(17): cm
  modified_base (18)..(21): um
gaacacaguucucuggcuuuu

SEQ ID NO: 3687 - RNA, 21 nt, Artificial Sequence
  Synthetic siRNA sense strand against beta-2GPI
  modified_base (1)..(2): um
  modified_base (3)..(3): cm
  modified_base (5)..(5): um
  modified_base (6)..(7): cm
  modified_base (14)..(15): cm
  modified_base (16)..(16): um
  modified_base (19)..(20): um
uucauccaaggaaccuaauug

SEQ ID NO: 3688 - RNA, 21 nt, Artificial Sequence
  Synthetic siRNA sense strand against beta-2GPI
  modified_base (1)..(2): um
  modified_base (3)..(3): cm
  modified_base (5)..(5): um
  modified_base (6)..(7): cm
  modified_base (14)..(15): cm
  modified_base (16)..(16): um
  modified_base (19)..(20): um
uucauccaaggaaccuaauug

SEQ ID NO: 3689 - RNA, 21 nt, Artificial Sequence
  Synthetic siRNA sense strand against beta-2GPI
  modified_base (1)..(2): um
  modified_base (3)..(3): cm
  modified_base (5)..(5): um
  modified_base (6)..(7): cm
  modified_base (14)..(15): cm
  modified_base (16)..(16): um
  modified_base (19)..(20): um
uucauccaaggaaccuaauug

SEQ ID NO: 3690 - RNA, 21 nt, Artificial Sequence
  Synthetic siRNA sense strand against beta-2GPI
  modified_base (1)..(2): um
  modified_base (3)..(3): cm
  modified_base (5)..(5): um
  modified_base (6)..(7): cm
  modified_base (14)..(15): cm
  modified_base (16)..(16): um
  modified_base (19)..(20): um
uucauccaaggaaccuaauug

SEQ ID NO: 3691 - RNA, 21 nt, Artificial Sequence
  Synthetic siRNA sense strand against beta-2GPI
  modified_base (1)..(2): um
  modified_base (3)..(3): cm
  modified_base (5)..(5): um
  modified_base (6)..(7): cm
  modified_base (14)..(15): cm
  modified_base (16)..(16): um
  modified_base (19)..(20): um
uucauccaaggaaccuaauug

SEQ ID NO: 3692 - RNA, 21 nt, Artificial Sequence
  Synthetic siRNA sense strand against beta-2GPI
  modified_base (1)..(2): um
  modified_base (3)..(3): cm
  modified_base (4)..(4): 2'-O-methyladenosine
  modified_base (5)..(5): um
  modified_base (6)..(7): cm
  modified_base (8)..(9): 2'-O-methyladenosine
  modified_base (10)..(11): gm
  modified_base (12)..(13): 2'-O-methyladenosine
  modified_base (14)..(15): cm
  modified_base (16)..(16): um
  modified_base (17)..(18): 2'-O-methyladenosine
  modified_base (19)..(20): um
  modified_base (21)..(21): gm
uucauccaaggaaccuaauug

SEQ ID NO: 3693 - RNA, 21 nt, Artificial Sequence
  Synthetic siRNA sense strand against beta-2GPI
  modified_base (1)..(2): um
  modified_base (3)..(3): cm
  modified_base (4)..(4): 2'-O-methyladenosine
  modified_base (5)..(5): um
  modified_base (6)..(7): cm
  modified_base (8)..(9): 2'-O-methyladenosine
  modified_base (10)..(11): gm
  modified_base (12)..(13): 2'-O-methyladenosine
  modified_base (14)..(15): cm
  modified_base (16)..(16): um
  modified_base (17)..(18): 2'-O-methyladenosine
  modified_base (19)..(20): um
  modified_base (21)..(21): gm
uucauccaaggaaccuaauug

SEQ ID NO: 3694 - RNA, 21 nt, Artificial Sequence
  Synthetic siRNA sense strand against beta-2GPI
  modified_base (1)..(2): um
  modified_base (3)..(3): cm
  modified_base (4)..(4): 2'-O-methyladenosine
  modified_base (5)..(5): um
  modified_base (6)..(7): cm
  modified_base (8)..(9): 2'-O-methyladenosine
  modified_base (10)..(11): gm
  modified_base (12)..(13): 2'-O-methyladenosine
  modified_base (14)..(15): cm
  modified_base (16)..(16): um
  modified_base (17)..(18): 2'-O-methyladenosine
  modified_base (19)..(20): um
  modified_base (21)..(21): gm
uucauccaaggaaccuaauug

SEQ ID NO: 3695 - RNA, 21 nt, Artificial Sequence
  Synthetic siRNA sense strand against beta-2GPI
  modified_base (1)..(2): um
  modified_base (3)..(3): cm
  modified_base (4)..(4): 2'-O-methyladenosine
  modified_base (5)..(5): um
  modified_base (6)..(7): cm
  modified_base (8)..(9): 2'-O-methyladenosine
  modified_base (10)..(11): gm
  modified_base (12)..(13): 2'-O-methyladenosine
  modified_base (14)..(15): cm
  modified_base (16)..(16): um
  modified_base (17)..(18): 2'-O-methyladenosine
  modified_base (19)..(20): um
  modified_base (21)..(21): gm
uucauccaaggaaccuaauug

SEQ ID NO: 3696 - RNA, 21 nt, Artificial Sequence
  Synthetic siRNA sense strand against beta-2GPI
  modified_base (1)..(2): um
  modified_base (3)..(3): cm
  modified_base (4)..(4): 2'-O-methyladenosine
  modified_base (5)..(5): um
  modified_base (6)..(7): cm
  modified_base (8)..(9): 2'-O-methyladenosine
  modified_base (10)..(11): gm
  modified_base (12)..(13): 2'-O-methyladenosine
  modified_base (14)..(15): cm
  modified_base (16)..(16): um
  modified_base (17)..(18): 2'-O-methyladenosine
  modified_base (19)..(20): um
  modified_base (21)..(21): gm
uucauccaaggaaccuaauug

SEQ ID NO: 3697 - RNA, 21 nt, Artificial Sequence
  Synthetic siRNA sense strand against beta-2GPI
  modified_base (1)..(2): um
  modified_base (3)..(3): cm
  modified_base (5)..(5): um
  modified_base (6)..(7): cm
  modified_base (14)..(15): cm
  modified_base (16)..(16): um
  modified_base (19)..(20): um
  modified_base (21)..(21): gm
uucauccaaggaaccuaauug

SEQ ID NO: 3698 - RNA, 21 nt, Artificial Sequence
  Synthetic siRNA sense strand against beta-2GPI
  modified_base (1)..(2): um
  modified_base (3)..(3): cm
  modified_base (5)..(5): um
  modified_base (6)..(7): cm
  modified_base (14)..(15): cm
  modified_base (16)..(16): um
  modified_base (19)..(20): um
  modified_base (21)..(21): gm
uucauccaaggaaccuaauug

SEQ ID NO: 3699 - RNA, 21 nt, Artificial Sequence
  Synthetic siRNA sense strand against beta-2GPI
  modified_base (1)..(2): um
  modified_base (3)..(3): cm
  modified_base (5)..(5): um
  modified_base (6)..(7): cm
  modified_base (14)..(15): cm
  modified_base (16)..(16): um
  modified_base (19)..(20): um
  modified_base (21)..(21): gm
uucauccaaggaaccuaauug

SEQ ID NO: 3700 - RNA, 21 nt, Artificial Sequence
  Synthetic siRNA sense strand against beta-2GPI
  modified_base (1)..(2): um
  modified_base (3)..(3): cm
  modified_base (5)..(5): um
  modified_base (6)..(7): cm
  modified_base (14)..(15): cm
  modified_base (16)..(16): um
  modified_base (19)..(20): um
  modified_base (21)..(21): gm
uucauccaaggaaccuaauug

SEQ ID NO: 3701 - RNA, 21 nt, Artificial Sequence
  Synthetic siRNA sense strand against beta-2GPI
  modified_base (1)..(2): um
  modified_base (3)..(3): cm
  modified_base (5)..(5): um
  modified_base (6)..(7): cm
  modified_base (14)..(15): cm
  modified_base (16)..(16): um
  modified_base (19)..(20): um
  modified_base (21)..(21): gm
uucauccaaggaaccuaauug

SEQ ID NO: 3702 - RNA, 21 nt, Artificial Sequence
  Synthetic siRNA antisense strand against beta-2GPI
ugcaauagcaacauggcagag

SEQ ID NO: 3703 - RNA, 21 nt, Artificial Sequence
  Synthetic siRNA antisense strand against beta-2GPI
  modified_base (3)..(3): cm
  modified_base (6)..(6): um
  modified_base (9)..(9): cm
  modified_base (12)..(12): cm
  modified_base (17)..(17): cm
ugcaauagcaacauggcagag

SEQ ID NO: 3704 - RNA, 21 nt, Artificial Sequence
  Synthetic siRNA antisense strand against beta-2GPI
  modified_base (3)..(3): cm
  modified_base (6)..(6): um
  modified_base (9)..(9): cm
  modified_base (12)..(12): cm
  modified_base (17)..(17): cm
  modified_base (20)..(20): 2'-O-methyladenosine
  modified_base (21)..(21): gm
ugcaauagcaacauggcagag

SEQ ID NO: 3705 - RNA, 21 nt, Artificial Sequence
  Synthetic siRNA antisense strand against beta-2GPI
  modified_base (3)..(3): cm
  modified_base (6)..(6): um
  modified_base (9)..(9): cm
  modified_base (17)..(17): cm
  modified_base (20)..(20): 2'-O-methyladenosine
  modified_base (21)..(21): gm
ugcaauagcaacauggcagag

SEQ ID NO: 3706 - RNA, 21 nt, Artificial Sequence
  Synthetic siRNA antisense strand against beta-2GPI
ugcaauagcaacauggcagag

SEQ ID NO: 3707 - RNA, 21 nt, Artificial Sequence
  Synthetic siRNA antisense strand against beta-2GPI
  modified_base (3)..(3): cm
  modified_base (6)..(6): um
  modified_base (9)..(9): cm
  modified_base (12)..(12): cm
  modified_base (17)..(17): cm
ugcaauagcaacauggcagag

SEQ ID NO: 3708 - RNA, 21 nt, Artificial Sequence
  Synthetic siRNA antisense strand against beta-2GPI
  modified_base (3)..(3): cm
  modified_base (6)..(6): um
  modified_base (9)..(9): cm
  modified_base (17)..(17): cm
  modified_base (20)..(20): 2'-O-methyladenosine
  modified_base (21)..(21): gm
ugcaauagcaacauggcagag

SEQ ID NO: 3709 - RNA, 21 nt, Artificial Sequence
  siRNA antisense strand against beta-2GPI
ugcaauagcaacauggcagag

SEQ ID NO: 3710 - RNA, 21 nt, Artificial Sequence
  Synthetic siRNA antisense strand against beta-2GPI
  modified_base (3)..(3): cm
  modified_base (6)..(6): um
  modified_base (9)..(9): cm
  modified_base (12)..(12): cm
  modified_base (17)..(17): cm
ugcaauagcaacauggcagag

SEQ ID NO: 3711 - RNA, 21 nt, Artificial Sequence
  Synthetic siRNA antisense strand against beta-2GPI
  modified_base (3)..(3): cm
  modified_base (6)..(6): um
  modified_base (9)..(9): cm
  modified_base (12)..(12): cm
  modified_base (17)..(17): cm
  modified_base (20)..(20): 2'-O-methyladenosine
  modified_base (21)..(21): gm
ugcaauagcaacauggcagag

SEQ ID NO: 3712 - RNA, 21 nt, Artificial Sequence
  Synthetic siRNA antisense strand against beta-2GPI
  modified_base (3)..(3): cm
  modified_base (6)..(6): um
  modified_base (9)..(9): cm
  modified_base (17)..(17): cm
  modified_base (20)..(20): 2'-O-methyladenosine
  modified_base (21)..(21): gm
ugcaauagcaacauggcagag

SEQ ID NO: 3713 - RNA, 21 nt, Artificial Sequence
  Synthetic siRNA antisense strand against beta-2GPI
  modified_base (1)..(1): um
  modified_base (3)..(3): cm
  modified_base (9)..(9): cm
  modified_base (14)..(14): um
  modified_base (17)..(17): cm
  modified_base (20)..(20): 2'-O-methyladenosine
  modified_base (21)..(21): gm
ugcaauagcaacauggcagag

SEQ ID NO: 3714 - RNA, 21 nt, Artificial Sequence
  Synthetic siRNA antisense strand against beta-2GPI
ugcaauagcaacauggcagag

SEQ ID NO: 3715 - RNA, 21 nt, Artificial Sequence
  Synthetic siRNA antisense strand against beta-2GPI
  modified_base (3)..(3): cm
  modified_base (6)..(6): um
  modified_base (9)..(9): cm
  modified_base (12)..(12): cm
  modified_base (17)..(17): cm
ugcaauagcaacauggcagag

SEQ ID NO: 3716 - RNA, 21 nt, Artificial Sequence
  Synthetic siRNA antisense strand against beta-2GPI
  modified_base (3)..(3): cm
  modified_base (6)..(6): um
  modified_base (9)..(9): cm
  modified_base (12)..(12): cm
  modified_base (17)..(17): cm
  modified_base (20)..(20): 2'-O-methyladenosine
  modified_base (21)..(21): gm
ugcaauagcaacauggcagag

SEQ ID NO: 3717 - RNA, 21 nt, Artificial Sequence
  Synthetic siRNA antisense strand against beta-2GPI
  modified_base (3)..(3): cm
  modified_base (6)..(6): um
  modified_base (9)..(9): cm
  modified_base (17)..(17): cm
  modified_base (20)..(20): 2'-O-methyladenosine
  modified_base (21)..(21): gm
ugcaauagcaacauggcagag

SEQ ID NO: 3718 - RNA, 21 nt, Artificial Sequence
  Synthetic siRNA antisense strand against beta-2GPI
ugcaauagcaacauggcagag

SEQ ID NO: 3719 - RNA, 21 nt, Artificial Sequence
  Synthetic siRNA antisense strand against beta-2GPI
  modified_base (3)..(3): cm
  modified_base (6)..(6): um
  modified_base (9)..(9): cm
  modified_base (12)..(12): cm
  modified_base (17)..(17): cm
ugcaauagcaacauggcagag

SEQ ID NO: 3720 - RNA, 21 nt, Artificial Sequence
  Synthetic siRNA antisense strand against beta-2GPI
  modified_base (3)..(3): cm
  modified_base (6)..(6): um
  modified_base (9)..(9): cm
  modified_base (12)..(12): cm
  modified_base (17)..(17): cm
  modified_base (20)..(20): 2'-O-methyladenosine
  modified_base (21)..(21): gm
ugcaauagcaacauggcagag

SEQ ID NO: 3721 - RNA, 21 nt, Artificial Sequence
  Synthetic siRNA antisense strand against beta-2GPI
  modified_base (3)..(3): cm
  modified_base (6)..(6): um
  modified_base (9)..(9): cm
  modified_base (17)..(17): cm
  modified_base (20)..(20): 2'-O-methyladenosine
  modified_base (21)..(21): gm
ugcaauagcaacauggcagag

SEQ ID NO: 3722 - RNA, 21 nt, Artificial Sequence
  Synthetic siRNA antisense strand against beta-2GPI
ugcaauagcaacauggcagag

SEQ ID NO: 3723 - RNA, 21 nt, Artificial Sequence
  Synthetic siRNA antisense strand against beta-2GPI
  modified_base (3)..(3): cm
  modified_base (6)..(6): um
  modified_base (9)..(9): cm
  modified_base (12)..(12): cm
  modified_base (17)..(17): cm
ugcaauagcaacauggcagag

SEQ ID NO: 3724 - RNA, 21 nt, Artificial Sequence
  Synthetic siRNA antisense strand against beta-2GPI
  modified_base (3)..(3): cm
  modified_base (6)..(6): um
  modified_base (9)..(9): cm
  modified_base (12)..(12): cm
  modified_base (17)..(17): cm
  modified_base (20)..(20): 2'-O-methyladenosine
  modified_base (21)..(21): gm
ugcaauagcaacauggcagag

SEQ ID NO: 3725 - RNA, 21 nt, Artificial Sequence
  Synthetic siRNA antisense strand against beta-2GPI
  modified_base (3)..(3): cm
  modified_base (6)..(6): um
  modified_base (9)..(9): cm
  modified_base (17)..(17): cm
  modified_base (20)..(20): 2'-O-methyladenosine
  modified_base (21)..(21): gm
ugcaauagcaacauggcagag

SEQ ID NO: 3726 - RNA, 21 nt, Artificial Sequence
  Synthetic siRNA antisense strand against beta-2GPI
uccugcaauagcaacauggca

SEQ ID NO: 3727 - RNA, 21 nt, Artificial Sequence
  Synthetic siRNA antisense strand against beta-2GPI
  modified_base (9)..(9): um
  modified_base (15)..(15): cm
  modified_base (20)..(20): cm
uccugcaauagcaacauggca

SEQ ID NO: 3728 - RNA, 21 nt, Artificial Sequence
  Synthetic siRNA antisense strand against beta-2GPI
  modified_base (9)..(9): um
  modified_base (15)..(15): cm
  modified_base (20)..(20): cm
  modified_base (21)..(21): 2'-O-methyladenosine
uccugcaauagcaacauggca

SEQ ID NO: 3729 - RNA, 21 nt, Artificial Sequence
  Synthetic siRNA antisense strand against beta-2GPI
  modified_base (4)..(4): um
  modified_base (6)..(6): cm
  modified_base (12)..(12): cm
  modified_base (17)..(17): um
  modified_base (20)..(20): cm
uccugcaauagcaacauggca

SEQ ID NO: 3730 - RNA, 21 nt, Artificial Sequence
  Synthetic siRNA antisense strand against beta-2GPI
  modified_base (4)..(4): um
  modified_base (6)..(6): cm
  modified_base (12)..(12): cm
  modified_base (17)..(17): um
  modified_base (20)..(20): cm
  modified_base (21)..(21): 2'-O-methyladenosine
uccugcaauagcaacauggca

SEQ ID NO: 3731 - RNA, 21 nt, Artificial Sequence
  Synthetic siRNA antisense strand against beta-2GPI
uccugcaauagcaacauggca

SEQ ID NO: 3732 - RNA, 21 nt, Artificial Sequence
  Synthetic siRNA antisense strand against beta-2GPI
  modified_base (9)..(9): um
  modified_base (15)..(15): cm
  modified_base (20)..(20): cm
uccugcaauagcaacauggca

SEQ ID NO: 3733 - RNA, 21 nt, Artificial Sequence
  Synthetic siRNA antisense strand against beta-2GPI
  modified_base (9)..(9): um
  modified_base (15)..(15): cm
  modified_base (20)..(20): cm
  modified_base (21)..(21): 2'-O-methyladenosine
uccugcaauagcaacauggca

SEQ ID NO: 3734 - RNA, 21 nt, Artificial Sequence
  Synthetic siRNA antisense strand against beta-2GPI
  modified_base (4)..(4): um
  modified_base (6)..(6): cm
  modified_base (12)..(12): cm
  modified_base (17)..(17): um
  modified_base (20)..(20): cm
uccugcaauagcaacauggca

SEQ ID NO: 3735 - RNA, 21 nt, Artificial Sequence
  Synthetic siRNA antisense strand against beta-2GPI
  modified_base (4)..(4): um
  modified_base (6)..(6): cm
  modified_base (12)..(12): cm
  modified_base (17)..(17): um
  modified_base (20)..(20): cm
  modified_base (21)..(21): 2'-O-methyladenosine
uccugcaauagcaacauggca

SEQ ID NO: 3736 - RNA, 21 nt, Artificial Sequence
  Synthetic siRNA antisense strand against beta-2GPI
uccugcaauagcaacauggca

SEQ ID NO: 3737 - RNA, 21 nt, Artificial Sequence
  Synthetic siRNA antisense strand against beta-2GPI
  modified_base (9)..(9): um
  modified_base (15)..(15): cm
  modified_base (20)..(20): cm
uccugcaauagcaacauggca

SEQ ID NO: 3738 - RNA, 21 nt, Artificial Sequence
  Synthetic siRNA antisense strand against beta-2GPI
  modified_base (9)..(9): um
  modified_base (15)..(15): cm
  modified_base (20)..(20): cm
  modified_base (21)..(21): 2'-O-methyladenosine
uccugcaauagcaacauggca

SEQ ID NO: 3739 - RNA, 21 nt, Artificial Sequence
  Synthetic siRNA antisense strand against beta-2GPI
  modified_base (4)..(4): um
  modified_base (6)..(6): cm
  modified_base (12)..(12): cm
  modified_base (17)..(17): um
  modified_base (20)..(20): cm
uccugcaauagcaacauggca

SEQ ID NO: 3740 - RNA, 21 nt, Artificial Sequence
  Synthetic siRNA antisense strand against beta-2GPI
  modified_base (4)..(4): um
  modified_base (6)..(6): cm
  modified_base (12)..(12): cm
  modified_base (17)..(17): um
  modified_base (20)..(20): cm
  modified_base (21)..(21): 2'-O-methyladenosine
uccugcaauagcaacauggca

SEQ ID NO: 3741 - RNA, 21 nt, Artificial Sequence
  Synthetic siRNA antisense strand against beta-2GPI
  modified_base (9)..(9): um
  modified_base (15)..(15): cm
  modified_base (17)..(17): um
  modified_base (20)..(20): cm
  modified_base (21)..(21): 2'-O-methyladenosine
uccugcaauagcaacauggca

SEQ ID NO: 3742 - RNA, 21 nt, Artificial Sequence
  Synthetic siRNA antisense strand against beta-2GPI
  modified_base (4)..(4): um
  modified_base (6)..(6): cm
  modified_base (9)..(9): um
  modified_base (15)..(15): cm
  modified_base (20)..(20): cm
  modified_base (21)..(21): 2'-O-methyladenosine
uccugcaauagcaacauggca

SEQ ID NO: 3743 - RNA, 21 nt, Artificial Sequence
  Synthetic siRNA antisense strand against beta-2GPI
  modified_base (4)..(4): um
  modified_base (6)..(6): cm
  modified_base (9)..(9): um
  modified_base (12)..(12): cm
  modified_base (15)..(15): cm
  modified_base (20)..(20): cm
  modified_base (21)..(21): 2'-O-methyladenosine
uccugcaauagcaacauggca

SEQ ID NO: 3744 - RNA, 21 nt, Artificial Sequence
  Synthetic siRNA antisense strand against beta-2GPI
  modified_base (4)..(4): um
  modified_base (6)..(6): cm
  modified_base (9)..(9): um
  modified_base (12)..(12): cm
  modified_base (15)..(15): cm
  modified_base (17)..(17): um
  modified_base (20)..(20): cm
  modified_base (21)..(21): 2'-O-methyladenosine
uccugcaauagcaacauggca

SEQ ID NO: 3745 - RNA, 21 nt, Artificial Sequence
  Synthetic siRNA antisense strand against beta-2GPI
  modified_base (9)..(9): um
  modified_base (15)..(15): cm
  modified_base (18)..(18): gm
  modified_base (20)..(20): cm
  modified_base (21)..(21): 2'-O-methyladenosine
uccugcaauagcaacauggca

SEQ ID NO: 3746 - RNA, 21 nt, Artificial Sequence
  Synthetic siRNA antisense strand against beta-2GPI
  modified_base (4)..(4): um
  modified_base (6)..(6): cm
  modified_base (9)..(9): um
  modified_base (12)..(12): cm
  modified_base (15)..(15): cm
  modified_base (18)..(18): gm
  modified_base (20)..(20): cm
  modified_base (21)..(21): 2'-O-methyladenosine
uccugcaauagcaacauggca

SEQ ID NO: 3747 - RNA, 21 nt, Artificial Sequence
  Synthetic siRNA antisense strand against beta-2GPI
  modified_base (3)..(3): cm
  modified_base (5)..(5): gm
  modified_base (9)..(9): um
  modified_base (12)..(12): cm
  modified_base (15)..(15): cm
  modified_base (18)..(18): gm
  modified_base (20)..(20): cm
  modified_base (21)..(21): 2'-O-methyladenosine
uccugcaauagcaacauggca

SEQ ID NO: 3748 - RNA, 21 nt, Artificial Sequence
  Synthetic siRNA antisense strand against beta-2GPI
  modified_base (9)..(9): um
  modified_base (15)..(15): cm
  modified_base (17)..(17): um
  modified_base (20)..(20): cm
  modified_base (21)..(21): 2'-O-methyladenosine
uccugcaauagcaacauggca

SEQ ID NO: 3749 - RNA, 21 nt, Artificial Sequence
  Synthetic siRNA antisense strand against beta-2GPI
  modified_base (4)..(4): um
  modified_base (6)..(6): cm
  modified_base (9)..(9): um
  modified_base (15)..(15): cm
  modified_base (20)..(20): cm
  modified_base (21)..(21): 2'-O-methyladenosine
uccugcaauagcaacauggca

SEQ ID NO: 3750 - RNA, 21 nt, Artificial Sequence
  Synthetic siRNA antisense strand against beta-2GPI
  modified_base (4)..(4): um
  modified_base (6)..(6): cm
  modified_base (9)..(9): um
  modified_base (12)..(12): cm
  modified_base (15)..(15): cm
  modified_base (20)..(20): cm
  modified_base (21)..(21): 2'-O-methyladenosine
uccugcaauagcaacauggca

SEQ ID NO: 3751 - RNA, 21 nt, Artificial Sequence
  Synthetic siRNA antisense strand against beta-2GPI
  modified_base (4)..(4): um
  modified_base (6)..(6): cm
  modified_base (9)..(9): um
  modified_base (12)..(12): cm
  modified_base (15)..(15): cm
  modified_base (17)..(17): um
  modified_base (20)..(20): cm
  modified_base (21)..(21): 2'-O-methyladenosine
uccugcaauagcaacauggca

SEQ ID NO: 3752 - RNA, 21 nt, Artificial Sequence
  Synthetic siRNA antisense strand against beta-2GPI
  modified_base (9)..(9): um
  modified_base (15)..(15): cm
  modified_base (18)..(18): gm
  modified_base (20)..(20): cm
  modified_base (21)..(21): 2'-O-methyladenosine
uccugcaauagcaacauggca

SEQ ID NO: 3753 - RNA, 21 nt, Artificial Sequence
  Synthetic siRNA antisense strand against beta-2GPI
  modified_base (4)..(4): um
  modified_base (6)..(6): cm
  modified_base (9)..(9): um
  modified_base (12)..(12): cm
  modified_base (15)..(15): cm
  modified_base (18)..(18): gm
  modified_base (20)..(20): cm
  modified_base (21)..(21): 2'-O-methyladenosine
uccugcaauagcaacauggca

SEQ ID NO: 3754 - RNA, 21 nt, Artificial Sequence
  Synthetic siRNA antisense strand against beta-2GPI
  modified_base (3)..(3): cm
  modified_base (5)..(5): gm
  modified_base (9)..(9): um
  modified_base (12)..(12): cm
  modified_base (15)..(15): cm
  modified_base (18)..(18): gm
  modified_base (20)..(20): cm
  modified_base (21)..(21): 2'-O-methyladenosine
uccugcaauagcaacauggca

SEQ ID NO: 3755 - RNA, 21 nt, Artificial Sequence
  Synthetic siRNA antisense strand against beta-2GPI
aaaucaucuggcuugggacag

SEQ ID NO: 3756 - RNA, 21 nt, Artificial Sequence
  Synthetic siRNA antisense strand against beta-2GPI
  modified_base (5)..(5): cm
  modified_base (19)..(19): cm
aaaucaucuggcuugggacag

SEQ ID NO: 3757 - RNA, 21 nt, Artificial Sequence
  Synthetic siRNA antisense strand against beta-2GPI
  modified_base (5)..(5): cm
  modified_base (19)..(19): cm
  modified_base (20)..(20): 2'-O-methyladenosine
  modified_base (21)..(21): gm
aaaucaucuggcuugggacag

SEQ ID NO: 3758 - RNA, 21 nt, Artificial Sequence
  Synthetic siRNA antisense strand against beta-2GPI
  modified_base (9)..(9): um
  modified_base (12)..(12): cm
  modified_base (14)..(14): um
  modified_base (20)..(20): 2'-O-methyladenosine
  modified_base (21)..(21): gm
aaaucaucuggcuugggacag

SEQ ID NO: 3759 - RNA, 21 nt, Artificial Sequence
  Synthetic siRNA antisense strand against beta-2GPI
aaaucaucuggcuugggacag

SEQ ID NO: 3760 - RNA, 21 nt, Artificial Sequence
  Synthetic siRNA antisense strand against beta-2GPI
aaaucaucuggcuugggacag

SEQ ID NO: 3761 - RNA, 21 nt, Artificial Sequence
  Synthetic siRNA antisense strand against beta-2GPI
  modified_base (5)..(5): cm
  modified_base (19)..(19): cm
aaaucaucuggcuugggacag

SEQ ID NO: 3762 - RNA, 21 nt, Artificial Sequence
  Synthetic siRNA antisense strand against beta-2GPI
  modified_base (5)..(5): cm
  modified_base (19)..(19): cm
  modified_base (20)..(20): 2'-O-methyladenosine
  modified_base (21)..(21): gm
aaaucaucuggcuugggacag

SEQ ID NO: 3763 - RNA, 21 nt, Artificial Sequence
  Synthetic siRNA antisense strand against beta-2GPI
  modified_base (9)..(9): um
  modified_base (12)..(12): cm
  modified_base (14)..(14): um
aaaucaucuggcuugggacag

SEQ ID NO: 3764 - RNA, 21 nt, Artificial Sequence
  Synthetic siRNA antisense strand against beta-2GPI
  modified_base (9)..(9): um
  modified_base (12)..(12): cm
  modified_base (14)..(14): um
  modified_base (20)..(20): 2'-O-methyladenosine
  modified_base (21)..(21): gm
aaaucaucuggcuugggacag

SEQ ID NO: 3765 - RNA, 21 nt, Artificial Sequence
  Synthetic siRNA antisense strand against beta-2GPI
uaaaucaucuggcuugggaca

SEQ ID NO: 3766 - RNA, 21 nt, Artificial Sequence
  Synthetic siRNA antisense strand against beta-2GPI
  modified_base (1)..(1): um
  modified_base (6)..(6): cm
  modified_base (20)..(20): cm
uaaaucaucuggcuugggaca

SEQ ID NO: 3767 - RNA, 21 nt, Artificial Sequence
  Synthetic siRNA antisense strand against beta-2GPI
  modified_base (1)..(1): um
  modified_base (6)..(6): cm
  modified_base (20)..(20): cm
  modified_base (21)..(21): 2'-O-methyladenosine
uaaaucaucuggcuugggaca

SEQ ID NO: 3768 - RNA, 21 nt, Artificial Sequence
  Synthetic siRNA antisense strand against beta-2GPI
  modified_base (10)..(10): um
  modified_base (13)..(13): cm
  modified_base (15)..(15): um
uaaaucaucuggcuugggaca

SEQ ID NO: 3769 - RNA, 21 nt, Artificial Sequence
  Synthetic siRNA antisense strand against beta-2GPI
  modified_base (10)..(10): um
  modified_base (13)..(13): cm
  modified_base (15)..(15): um
  modified_base (20)..(20): cm
  modified_base (21)..(21): 2'-O-methyladenosine
uaaaucaucuggcuugggaca

SEQ ID NO: 3770 - RNA, 21 nt, Artificial Sequence
  Synthetic siRNA antisense strand against beta-2GPI
uaaaucaucuggcuugggaca

SEQ ID NO: 3771 - RNA, 21 nt, Artificial Sequence
  Synthetic siRNA antisense strand against beta-2GPI
  modified_base (1)..(1): um
  modified_base (6)..(6): cm
  modified_base (20)..(20): cm
uaaaucaucuggcuugggaca

SEQ ID NO: 3772 - RNA, 21 nt, Artificial Sequence
  Synthetic siRNA antisense strand against beta-2GPI
  modified_base (1)..(1): um
  modified_base (6)..(6): cm
  modified_base (20)..(20): cm
  modified_base (21)..(21): 2'-O-methyladenosine
uaaaucaucuggcuugggaca

SEQ ID NO: 3773 - RNA, 21 nt, Artificial Sequence
  Synthetic siRNA antisense strand against beta-2GPI
  modified_base (10)..(10): um
  modified_base (13)..(13): cm
  modified_base (15)..(15): um
uaaaucaucuggcuugggaca

SEQ ID NO: 3774 - RNA, 21 nt, Artificial Sequence
  Synthetic siRNA antisense strand against beta-2GPI
  modified_base (10)..(10): um
  modified_base (13)..(13): cm
  modified_base (15)..(15): um
  modified_base (20)..(20): cm
  modified_base (21)..(21): 2'-O-methyladenosine
uaaaucaucuggcuugggaca

SEQ ID NO: 3775 - RNA, 21 nt, Artificial Sequence
  Synthetic siRNA antisense strand against beta-2GPI
auaguucacaaauccauuguc

SEQ ID NO: 3776 - RNA, 21 nt, Artificial Sequence
  Synthetic siRNA antisense strand against beta-2GPI
  modified_base (2)..(2): um
  modified_base (7)..(7): cm
  modified_base (9)..(9): cm
  modified_base (15)..(15): cm
auaguucacaaauccauuguc

SEQ ID NO: 3777 - RNA, 21 nt, Artificial Sequence
  Synthetic siRNA antisense strand against beta-2GPI
  modified_base (2)..(2): um
  modified_base (7)..(7): cm
  modified_base (9)..(9): cm
  modified_base (15)..(15): cm
  modified_base (20)..(20): um
  modified_base (21)..(21): cm
auaguucacaaauccauuguc

SEQ ID NO: 3778 - RNA, 21 nt, Artificial Sequence
  Synthetic siRNA antisense strand against beta-2GPI
  modified_base (5)..(5): um
  modified_base (18)..(18): um
  modified_base (20)..(20): um
auaguucacaaauccauuguc

SEQ ID NO: 3779 - RNA, 21 nt, Artificial Sequence
  Synthetic siRNA antisense strand against beta-2GPI
  modified_base (5)..(5): um
  modified_base (18)..(18): um
  modified_base (20)..(20): um
  modified_base (21)..(21): cm
auaguucacaaauccauuguc

SEQ ID NO: 3780 - RNA, 21 nt, Artificial Sequence
  Synthetic siRNA antisense strand against beta-2GPI
auaguucacaaauccauuguc

SEQ ID NO: 3781 - RNA, 21 nt, Artificial Sequence
  Synthetic siRNA antisense strand against beta-2GPI
  modified_base (2)..(2): um
  modified_base (7)..(7): cm
  modified_base (9)..(9): cm
  modified_base (15)..(15): cm
auaguucacaaauccauuguc

SEQ ID NO: 3782 - RNA, 21 nt, Artificial Sequence
  Synthetic siRNA antisense strand against beta-2GPI
  modified_base (2)..(2): um
  modified_base (7)..(7): cm
  modified_base (9)..(9): cm
  modified_base (15)..(15): cm
  modified_base (20)..(20): um
  modified_base (21)..(21): cm
auaguucacaaauccauuguc

SEQ ID NO: 3783 - RNA, 21 nt, Artificial Sequence
  Synthetic siRNA antisense strand against beta-2GPI
  modified_base (5)..(5): um
  modified_base (18)..(18): um
  modified_base (20)..(20): um
auaguucacaaauccauuguc

SEQ ID NO: 3784 - RNA, 21 nt, Artificial Sequence
  Synthetic siRNA antisense strand against beta-2GPI
  modified_base (5)..(5): um
  modified_base (18)..(18): um
  modified_base (20)..(20): um
  modified_base (21)..(21): cm
auaguucacaaauccauuguc

SEQ ID NO: 3785 - RNA, 21 nt, Artificial Sequence
  Synthetic siRNA antisense strand against beta-2GPI
ugcuuuacaacuuggcauggc

SEQ ID NO: 3786 - RNA, 21 nt, Artificial Sequence
  Synthetic siRNA antisense strand against beta-2GPI
  modified_base (6)..(6): um
  modified_base (8)..(8): cm
  modified_base (16)..(16): cm
ugcuuuacaacuuggcauggc

SEQ ID NO: 3787 - RNA, 21 nt, Artificial Sequence
  Synthetic siRNA antisense strand against beta-2GPI
  modified_base (6)..(6): um
  modified_base (8)..(8): cm
  modified_base (16)..(16): cm
  modified_base (20)..(20): gm
  modified_base (21)..(21): cm
ugcuuuacaacuuggcauggc

SEQ ID NO: 3788 - RNA, 21 nt, Artificial Sequence
  Synthetic siRNA antisense strand against beta-2GPI
  modified_base (1)..(1): um
  modified_base (3)..(3): cm
  modified_base (13)..(13): um
  modified_base (16)..(16): cm
  modified_base (18)..(18): um
  modified_base (21)..(21): cm
ugcuuuacaacuuggcauggc

SEQ ID NO: 3789 - RNA, 21 nt, Artificial Sequence
  Synthetic siRNA antisense strand against beta-2GPI
  modified_base (1)..(1): um
  modified_base (3)..(3): cm
  modified_base (13)..(13): um
  modified_base (16)..(16): cm
  modified_base (18)..(18): um
  modified_base (20)..(20): gm
  modified_base (21)..(21): cm
ugcuuuacaacuuggcauggc

SEQ ID NO: 3790 - RNA, 21 nt, Artificial Sequence
  Synthetic siRNA antisense strand against beta-2GPI
ugcuuuacaacuuggcauggc

SEQ ID NO: 3791 - RNA, 21 nt, Artificial Sequence
  Synthetic siRNA antisense strand against beta-2GPI
  modified_base (6)..(6): um
  modified_base (8)..(8): cm
  modified_base (16)..(16): cm
ugcuuuacaacuuggcauggc

SEQ ID NO: 3792 - RNA, 21 nt, Artificial Sequence
  Synthetic siRNA antisense strand against beta-2GPI
  modified_base (6)..(6): um
  modified_base (8)..(8): cm
  modified_base (16)..(16): cm
  modified_base (20)..(20): gm
  modified_base (21)..(21): cm
ugcuuuacaacuuggcauggc

SEQ ID NO: 3793 - RNA, 21 nt, Artificial Sequence
  Synthetic siRNA antisense strand against beta-2GPI
uacucucucuccuugguacac

SEQ ID NO: 3794 - RNA, 21 nt, Artificial Sequence
  Synthetic siRNA antisense strand against beta-2GPI
  modified_base (1)..(1): um
  modified_base (17)..(17): um
  modified_base (19)..(19): cm
uacucucucuccuugguacac

SEQ ID NO: 3795 - RNA, 21 nt, Artificial Sequence
  Synthetic siRNA antisense strand against beta-2GPI
  modified_base (1)..(1): um
  modified_base (17)..(17): um
  modified_base (19)..(19): cm
  modified_base (20)..(20): 2'-O-methyladenosine
  modified_base (21)..(21): cm
uacucucucuccuugguacac

SEQ ID NO: 3796 - RNA, 21 nt, Artificial Sequence
  Synthetic siRNA antisense strand against beta-2GPI
  modified_base (14)..(14): um
  modified_base (17)..(17): um
uacucucucuccuugguacac

SEQ ID NO: 3797 - RNA, 21 nt, Artificial Sequence
  Synthetic siRNA antisense strand against beta-2GPI
  modified_base (14)..(14): um
  modified_base (17)..(17): um
  modified_base (20)..(20): 2'-O-methyladenosine
  modified_base (21)..(21): cm
uacucucucuccuugguacac

SEQ ID NO: 3798 - RNA, 21 nt, Artificial Sequence
  Synthetic siRNA antisense strand against beta-2GPI
uacucucucuccuugguacac

SEQ ID NO: 3799 - RNA, 21 nt, Artificial Sequence
  Synthetic siRNA antisense strand against beta-2GPI
uacucucucuccuugguacac

SEQ ID NO: 3800 - RNA, 21 nt, Artificial Sequence
  Synthetic siRNA antisense strand against beta-2GPI
  modified_base (1)..(1): um
  modified_base (17)..(17): um
  modified_base (19)..(19): cm
uacucucucuccuugguacac

SEQ ID NO: 3801 - RNA, 21 nt, Artificial Sequence
  Synthetic siRNA antisense strand against beta-2GPI
  modified_base (1)..(1): um
  modified_base (17)..(17): um
  modified_base (19)..(19): cm
  modified_base (20)..(20): 2'-O-methyladenosine
  modified_base (21)..(21): cm
uacucucucuccuugguacac

SEQ ID NO: 3802 - RNA, 21 nt, Artificial Sequence
  Synthetic siRNA antisense strand against beta-2GPI
  modified_base (14)..(14): um
  modified_base (17)..(17): um
uacucucucuccuugguacac

SEQ ID NO: 3803 - RNA, 21 nt, Artificial Sequence
  Synthetic siRNA antisense strand against beta-2GPI
  modified_base (14)..(14): um
  modified_base (17)..(17): um
  modified_base (20)..(20): 2'-O-methyladenosine
  modified_base (21)..(21): cm
uacucucucuccuugguacac

SEQ ID NO: 3804 - RNA, 21 nt, Artificial Sequence
  Synthetic siRNA antisense strand against beta-2GPI
uuuugcagaagaaagaaacuu

SEQ ID NO: 3805 - RNA, 21 nt, Artificial Sequence
  Synthetic siRNA antisense strand against beta-2GPI
  modified_base (6)..(6): cm
uuuugcagaagaaagaaacuu

SEQ ID NO: 3806 - RNA, 21 nt, Artificial Sequence
  Synthetic siRNA antisense strand against beta-2GPI
  modified_base (6)..(6): cm
  modified_base (20)..(21): um
uuuugcagaagaaagaaacuu

SEQ ID NO: 3807 - RNA, 21 nt, Artificial Sequence
  Synthetic siRNA antisense strand against beta-2GPI
  modified_base (4)..(4): um
  modified_base (6)..(6): cm
uuuugcagaagaaagaaacuu

SEQ ID NO: 3808 - RNA, 21 nt, Artificial Sequence
  Synthetic siRNA antisense strand against beta-2GPI
  modified_base (4)..(4): um
  modified_base (6)..(6): cm
  modified_base (20)..(21): um
uuuugcagaagaaagaaacuu

SEQ ID NO: 3809 - RNA, 21 nt, Artificial Sequence
  Synthetic siRNA antisense strand against beta-2GPI
uuuugcagaagaaagaaacuu

SEQ ID NO: 3810 - RNA, 21 nt, Artificial Sequence
  Synthetic siRNA antisense strand against beta-2GPI
  modified_base (6)..(6): cm
uuuugcagaagaaagaaacuu

SEQ ID NO: 3811 - RNA, 21 nt, Artificial Sequence
  Synthetic siRNA antisense strand against beta-2GPI
  modified_base (6)..(6): cm
  modified_base (20)..(21): um
uuuugcagaagaaagaaacuu

SEQ ID NO: 3812 - RNA, 21 nt, Artificial Sequence
  Synthetic siRNA antisense strand against beta-2GPI
  modified_base (4)..(4): um
  modified_base (6)..(6): cm
uuuugcagaagaaagaaacuu

SEQ ID NO: 3813 - RNA, 21 nt, Artificial Sequence
  Synthetic siRNA antisense strand against beta-2GPI
  modified_base (4)..(4): um
  modified_base (6)..(6): cm
  modified_base (20)..(21): um
uuuugcagaagaaagaaacuu

SEQ ID NO: 3814 - RNA, 21 nt, Artificial Sequence
  Synthetic siRNA antisense strand against beta-2GPI
uuuugcagaagaaagaaacuu

SEQ ID NO: 3815 - RNA, 21 nt, Artificial Sequence
  Synthetic siRNA antisense strand against beta-2GPI
  modified_base (6)..(6): cm
uuuugcagaagaaagaaacuu

SEQ ID NO: 3816 - RNA, 21 nt, Artificial Sequence
  Synthetic siRNA antisense strand against beta-2GPI
  modified_base (6)..(6): cm
  modified_base (20)..(21): um
uuuugcagaagaaagaaacuu

SEQ ID NO: 3817 - RNA, 21 nt, Artificial Sequence
  Synthetic siRNA antisense strand against beta-2GPI
  modified_base (4)..(4): um
  modified_base (6)..(6): cm
uuuugcagaagaaagaaacuu

SEQ ID NO: 3818 - RNA, 21 nt, Artificial Sequence
  Synthetic siRNA antisense strand against beta-2GPI
  modified_base (4)..(4): um
  modified_base (6)..(6): cm
  modified_base (20)..(21): um
uuuugcagaagaaagaaacuu

SEQ ID NO: 3819 - RNA, 21 nt, Artificial Sequence
  Synthetic siRNA antisense strand against beta-2GPI
uguuccuugaagcauuugggg

SEQ ID NO: 3820 - RNA, 21 nt, Artificial Sequence
  Synthetic siRNA antisense strand against beta-2GPI
  modified_base (13)..(13): cm
uguuccuugaagcauuugggg

SEQ ID NO: 3821 - RNA, 21 nt, Artificial Sequence
  Synthetic siRNA antisense strand against beta-2GPI
  modified_base (13)..(13): cm
  modified_base (20)..(21): gm
uguuccuugaagcauuugggg

SEQ ID NO: 3822 - RNA, 21 nt, Artificial Sequence
  Synthetic siRNA antisense strand against beta-2GPI
  modified_base (1)..(1): um
  modified_base (3)..(3): um
  modified_base (8)..(8): um
  modified_base (13)..(13): cm
  modified_base (17)..(17): um
uguuccuugaagcauuugggg

SEQ ID NO: 3823 - RNA, 21 nt, Artificial Sequence
  Synthetic siRNA antisense strand against beta-2GPI
  modified_base (1)..(1): um
  modified_base (3)..(3): um
  modified_base (8)..(8): um
  modified_base (13)..(13): cm
  modified_base (17)..(17): um
  modified_base (20)..(21): gm
uguuccuugaagcauuugggg

SEQ ID NO: 3824 - RNA, 21 nt, Artificial Sequence
  Synthetic siRNA antisense strand against beta-2GPI
uguuccuugaagcauuugggg

SEQ ID NO: 3825 - RNA, 21 nt, Artificial Sequence
  Synthetic siRNA antisense strand against beta-2GPI
  modified_base (13)..(13): cm
uguuccuugaagcauuugggg

SEQ ID NO: 3826 - RNA, 21 nt, Artificial Sequence
  Synthetic siRNA antisense strand against beta-2GPI
  modified_base (13)..(13): cm
  modified_base (20)..(21): gm
uguuccuugaagcauuugggg

SEQ ID NO: 3827 - RNA, 21 nt, Artificial Sequence
  Synthetic siRNA antisense strand against beta-2GPI
  modified_base (1)..(1): um
  modified_base (3)..(3): um
  modified_base (8)..(8): um
  modified_base (13)..(13): cm
  modified_base (17)..(17): um
uguuccuugaagcauuugggg

SEQ ID NO: 3828 - RNA, 21 nt, Artificial Sequence
  Synthetic siRNA antisense strand against beta-2GPI
  modified_base (1)..(1): um
  modified_base (3)..(3): um
  modified_base (8)..(8): um
  modified_base (13)..(13): cm
  modified_base (17)..(17): um
  modified_base (20)..(21): gm
uguuccuugaagcauuugggg

SEQ ID NO: 3829 - RNA, 21 nt, Artificial Sequence
  Synthetic siRNA antisense strand against beta-2GPI
uguuccuugaagcauuugggg

SEQ ID NO: 3830 - RNA, 21 nt, Artificial Sequence
  Synthetic siRNA antisense strand against beta-2GPI
  modified_base (13)..(13): cm
uguuccuugaagcauuugggg

SEQ ID NO: 3831 - RNA, 21 nt, Artificial Sequence
  Synthetic siRNA antisense strand against beta-2GPI
  modified_base (13)..(13): cm
  modified_base (20)..(21): gm
uguuccuugaagcauuugggg

SEQ ID NO: 3832 - RNA, 21 nt, Artificial Sequence
  Synthetic siRNA antisense strand against beta-2GPI
  modified_base (1)..(1): um
  modified_base (3)..(3): um
  modified_base (8)..(8): um
  modified_base (13)..(13): cm
  modified_base (17)..(17): um
  modified_base (20)..(21): gm
uguuccuugaagcauuugggg

SEQ ID NO: 3833 - RNA, 21 nt, Artificial Sequence
  Synthetic siRNA antisense strand against beta-2GPI
agccagagaacuguguuccuu

SEQ ID NO: 3834 - RNA, 21 nt, Artificial Sequence
  Synthetic siRNA antisense strand against beta-2GPI
  modified_base (4)..(4): cm
agccagagaacuguguuccuu

SEQ ID NO: 3835 - RNA, 21 nt, Artificial Sequence
  Synthetic siRNA antisense strand against beta-2GPI
  modified_base (4)..(4): cm
  modified_base (20)..(21): um
agccagagaacuguguuccuu

SEQ ID NO: 3836 - RNA, 21 nt, Artificial Sequence
  Synthetic siRNA antisense strand against beta-2GPI
agccagagaacuguguuccuu

SEQ ID NO: 3837 - RNA, 21 nt, Artificial Sequence
  Synthetic siRNA antisense strand against beta-2GPI
  modified_base (4)..(4): cm
agccagagaacuguguuccuu

SEQ ID NO: 3838 - RNA, 21 nt, Artificial Sequence
  Synthetic siRNA antisense strand against beta-2GPI
aagccagagaacuguguuccu

SEQ ID NO: 3839 - RNA, 21 nt, Artificial Sequence
  Synthetic siRNA antisense strand against beta-2GPI
  modified_base (5)..(5): cm
aagccagagaacuguguuccu

SEQ ID NO: 3840 - RNA, 21 nt, Artificial Sequence
  Synthetic siRNA antisense strand against beta-2GPI
  modified_base (5)..(5): cm
  modified_base (20)..(20): cm
  modified_base (21)..(21): um
aagccagagaacuguguuccu

SEQ ID NO: 3841 - RNA, 21 nt, Artificial Sequence
  Synthetic siRNA antisense strand against beta-2GPI
  modified_base (4)..(4): cm
  modified_base (13)..(13): um
  modified_base (15)..(15): um
  modified_base (17)..(17): um
aagccagagaacuguguuccu

SEQ ID NO: 3842 - RNA, 21 nt, Artificial Sequence
  Synthetic siRNA antisense strand against beta-2GPI
  modified_base (4)..(4): cm
  modified_base (13)..(13): um
  modified_base (15)..(15): um
  modified_base (17)..(17): um
  modified_base (20)..(20): cm
  modified_base (21)..(21): um
aagccagagaacuguguuccu

SEQ ID NO: 3843 - RNA, 21 nt, Artificial Sequence
  Synthetic siRNA antisense strand against beta-2GPI
  modified_base (5)..(5): cm
aagccagagaacuguguuccu

SEQ ID NO: 3844 - RNA, 21 nt, Artificial Sequence
  Synthetic siRNA antisense strand against beta-2GPI
  modified_base (5)..(5): cm
  modified_base (20)..(20): cm
  modified_base (21)..(21): um
aagccagagaacuguguuccu

SEQ ID NO: 3845 - RNA, 21 nt, Artificial Sequence
  Synthetic siRNA antisense strand against beta-2GPI
  modified_base (4)..(4): cm
  modified_base (13)..(13): um
  modified_base (15)..(15): um
  modified_base (17)..(17): um
aagccagagaacuguguuccu

SEQ ID NO: 3846 - RNA, 21 nt, Artificial Sequence
  Synthetic siRNA antisense strand against beta-2GPI
  modified_base (4)..(4): cm
  modified_base (13)..(13): um
  modified_base (15)..(15): um
  modified_base (17)..(17): um
  modified_base (20)..(20): cm
  modified_base (21)..(21): um
aagccagagaacuguguuccu

SEQ ID NO: 3847 - RNA, 21 nt, Artificial Sequence
  Synthetic siRNA antisense strand against beta-2GPI
auuagguuccuuggaugaaca

SEQ ID NO: 3848 - RNA, 21 nt, Artificial Sequence
  Synthetic siRNA antisense strand against beta-2GPI
  modified_base (3)..(3): um
  modified_base (20)..(20): cm
auuagguuccuuggaugaaca

SEQ ID NO: 3849 - RNA, 21 nt, Artificial Sequence
  Synthetic siRNA antisense strand against beta-2GPI
  modified_base (3)..(3): um
  modified_base (20)..(20): cm
  modified_base (21)..(21): 2'-O-methyladenosine
auuagguuccuuggaugaaca

SEQ ID NO: 3850 - RNA, 21 nt, Artificial Sequence
  Synthetic siRNA antisense strand against beta-2GPI
  modified_base (7)..(7): um
  modified_base (12)..(12): um
  modified_base (16)..(16): um
auuagguuccuuggaugaaca

SEQ ID NO: 3851 - RNA, 21 nt, Artificial Sequence
  Synthetic siRNA antisense strand against beta-2GPI
  modified_base (7)..(7): um
  modified_base (12)..(12): um
  modified_base (16)..(16): um
  modified_base (20)..(20): cm
  modified_base (21)..(21): 2'-O-methyladenosine
auuagguuccuuggaugaaca

SEQ ID NO: 3852 - RNA, 21 nt, Artificial Sequence
  Synthetic siRNA antisense strand against beta-2GPI
auuagguuccuuggaugaaca

SEQ ID NO: 3853 - RNA, 21 nt, Artificial Sequence
  Synthetic siRNA antisense strand against beta-2GPI
  modified_base (3)..(3): um
  modified_base (20)..(20): cm
auuagguuccuuggaugaaca

SEQ ID NO: 3854 - RNA, 21 nt, Artificial Sequence
  Synthetic siRNA antisense strand against beta-2GPI
  modified_base (3)..(3): um
  modified_base (20)..(20): cm
  modified_base (21)..(21): 2'-O-methyladenosine
auuagguuccuuggaugaaca

SEQ ID NO: 3855 - RNA, 21 nt, Artificial Sequence
  Synthetic siRNA antisense strand against beta-2GPI
  modified_base (7)..(7): um
  modified_base (12)..(12): um
  modified_base (16)..(16): um
auuagguuccuuggaugaaca

SEQ ID NO: 3856 - RNA, 21 nt, Artificial Sequence
  Synthetic siRNA antisense strand against beta-2GPI
  modified_base (7)..(7): um
  modified_base (12)..(12): um
  modified_base (16)..(16): um
  modified_base (20)..(20): cm
  modified_base (21)..(21): 2'-O-methyladenosine
auuagguuccuuggaugaaca

SEQ ID NO: 3857 - RNA, 21 nt, Artificial Sequence
  Synthetic siRNA antisense strand against beta-2GPI
auuagguuccuuggaugaaca

SEQ ID NO: 3858 - RNA, 21 nt, Artificial Sequence
  Synthetic siRNA antisense strand against beta-2GPI
  modified_base (3)..(3): um
  modified_base (20)..(20): cm
auuagguuccuuggaugaaca

SEQ ID NO: 3859 - RNA, 21 nt, Artificial Sequence
  Synthetic siRNA antisense strand against beta-2GPI
  modified_base (3)..(3): um
  modified_base (20)..(20): cm
  modified_base (21)..(21): 2'-O-methyladenosine
auuagguuccuuggaugaaca

SEQ ID NO: 3860 - RNA, 21 nt, Artificial Sequence
  Synthetic siRNA antisense strand against beta-2GPI
  modified_base (7)..(7): um
  modified_base (12)..(12): um
  modified_base (16)..(16): um
auuagguuccuuggaugaaca

SEQ ID NO: 3861 - RNA, 21 nt, Artificial Sequence
  Synthetic siRNA antisense strand against beta-2GPI
  modified_base (7)..(7): um
  modified_base (12)..(12): um
  modified_base (16)..(16): um
  modified_base (20)..(20)beta: cm
  modified_base (21)..(21): 2'-O-methyladenosine
auuagguuccuuggaugaaca

1. A double-stranded nucleic acid that decreases expression of β2GPI gene, which consists of a sense strand and an antisense strand, and comprises a double-stranded region of at least 11 base pairs, wherein an oligonucleotide chain having a chain length of at least 17 nucleotides and 30 nucleotides at most in the aforementioned antisense strand is complementary to a target β2GPI mRNA sequence selected from the group described in Tables 1-1 to 1-16.

2. The double-stranded nucleic acid according to claim 1, wherein the aforementioned double-stranded region is composed of 11-27 base pairs, and the 2nd nucleotide from the 5′-terminus of the aforementioned antisense strand complementary to the target β2GPI mRNA sequence selected from the group described in Tables 1-1 to 1-16 is complement to the 2nd deoxyribonucleotide from the 3′-terminus of the target β2GPI mRNA sequence.

3. The double-stranded nucleic acid according to claim 1, wherein the 3′-terminus of the aforementioned sense strand and the 5′-terminus of the aforementioned antisense strand form a blunt end.

4. The double-stranded nucleic acid according to claim 1, wherein the aforementioned sense strand is 21 nucleotides in length and the aforementioned antisense strand is 21 nucleotides in length.

5. The double-stranded nucleic acid according to claim 4, which is a modified double-stranded nucleic acid comprising a double-stranded region of 19 base pairs that decreases expression of β2GPI gene, wherein 40-65% of the nucleotides in the double-stranded region comprises 2′-O-methyl modified nucleotide.

6. The double-stranded nucleic acid according to claim 1, wherein the aforementioned antisense strand comprises a sequence selected from the groups described in “antisense strand” in Tables 1-1 to 1-16 and Tables 3-1 to 3-5.

7. The double-stranded nucleic acid according to claim 1, wherein the aforementioned sense strand comprises a sequence selected from the groups described in “sense strand” in Tables 1-1 to 1-16 and Tables 3-1 to 3-5.

8. The double-stranded nucleic acid according to claim 1, comprising a sequence of 1 pair of sense strand/antisense strand selected from the group consisting of the sense strands/antisense strands described in Tables 1-1 to 1-16 and Tables 3-1 to 3-5.

9. The double-stranded nucleic acid according to claim 1, comprising a ligand.

10. A single strand nucleic acid consisting only of an antisense strand in the double-stranded nucleic acid according to claim 1.

11. A pharmaceutical composition comprising the nucleic acid according to claim 1.

12. A method of treating a disorder mediated by an anti-β2GPI antibody, comprising a step of administering a therapeutically effective amount of the nucleic acid according to claim 1 or the pharmaceutical composition comprising the nucleic acid according to claim 1 to a human in need of such treatment.

13. The method according to claim 12, wherein the aforementioned disorder is an autoimmune disease or thrombosis.
